United States Patent Application Publication US 2006/0134663 A1 - sequence listing, part 140

SEQ ID NO: 481055 - DNA, 1000 bp, Homo Sapiens
tcttgatgaaatcaaaacccctagccacaaaacattttatttacaaaatatatactgaatactatacatctggccccatcaccatggaaacaactccaaagcctgcctggggatttgtgcccaagcccagcccaggagggctagagaaagcaaaggtgtctaccagccgccsccatcccagaaggaaagcctcttcccatgagtgcctgtgggtgggcggtgagctcaacacccacaaagggcagaaggcctgggggcagtgaggtgatggtgagggcatgggaagcagatgctgctgagggtgggtggagggagaaatggagacccagcacccagcagggggagccaggtgacagcaggggaagcagatggcagggccccaggcagtccaggaccccaggctctgaagggtggggcaagggggtcaggtcacgtcttgacatccagcagtggcatccgcttgtgctggtagccactctgccagccatgtaccacctgtcggggaggagaccacaccacaaggctgggctgtgttccctgggagtctgcagcacccagttacagcccaagtaagcagaaccaggctctggtttcagtgtggacgagtatggctgggaacagggctgactcccaccttgcctcattctccccctggcccccaagtgctcaccttggggtctcccatgtcagagagcagctcctgctcagcctcatgcagttcctcagctgggtcatagctgtacatggggagcaggtgatggcgcagccggtccaccctggggagcaggggaggggactcagctaggaggtccccccaaccctcatcaaacacctggctgcctcgtctctcctccctttcccaggcaggggcaattccagtgggtgccttttgggacacactatacctccaagaatacaaccctgattctacaaaggggctttccccagtgagtaacctgaggctggggcagggaaaacaaatttcaggcttgtatcagga

SEQ ID NO: 481056 - DNA, 1000 bp, Homo Sapiens; identical to SEQ ID NO: 119896

SEQ ID NO: 481057 - DNA, 1000 bp, Homo Sapiens; identical to SEQ ID NO: 308068

SEQ ID NO: 481058 - DNA, 1000 bp, Homo Sapiens; identical to SEQ ID NO: 308069

SEQ ID NO: 481059 - DNA, 1000 bp, Homo Sapiens
agaacaggaggtgggaatgttccccatctgccacggagctctcctgacagtggctccgcttgcagcagggctaagacctcatactcacgtccatgtagttcttgagcacctcgggaatgggcccctcggtcacggctggcaccgcctgggagtactttgagacggggcctttggcaatcaggtcctccacagagcccccaacctccgacatggtccggcggatggacgtgaacttgtgcagcgggatcctgtcaaccacgggtcggggcatatcagggaggccctcccgcctgccggccgacgctgccaatgctgcacatccacctggaggcccctggggaatctcagagtcgccacagccaaaaccaaactcctgcctgtcacctggaaactgctggcccagtccccccaagtcagtgaatggcaacccattgccccccgccaggttgcacaggccacagtcctaagaagtggtcacccgccacccacctcagccccacacacccaacctgggggccagtgtgcccaaccctcctctcctcagccattctggaggctccaaagcccccaagggtctcccgtcctcctctgcacctgcgtctggtctcttccaggatggtggccagcatggctgctcagggtgctggcgggtacctgtcactcctgcccaaagtcctctgaggcagcccactgtacccagcccccatcacacctgctctccacccccagacacctgcacgaaggtggccccacctccaggctggcactggcagctctgcctggcctcctctggccatcagatgggccctccacaccacctccagaagccctccttgactacctgtcctcctccacatggaccctgtggctgcccagtgccctcatcccacatctgtttctgggcatccgcacctctcctcactccatgcggctccacgaggtccaggactgcacctggggccttagaggcttctgagctgccccccccaccgccctgcct

SEQ ID NO: 481060 - DNA, 1000 bp, Homo Sapiens
tatttgtaaaatcgcgtaaattttgtaatcagctcatttttaccataggcgaatcggcaaatcctataatcaaagaatagaccgagatagggttgagtgttgttccagtttggaacaagagtccactattaaagaacgtggactccaacgtcaaagggcgaaaaaccgtctatcagggcgatggcccctacgtgaaccatcaccctaatcaagttttttggggtcgaggtgccgtaaagcactaaatcggaacctaaaggagcccccgatttagagcttgacggggaaagccggcgaacgtggcgagaaaggaagggaagaaagcgaaaggagcggcgctagggcgctggcaagtgtagcggtcctgcgcgtaaccaccacacccgccgcgcttaatgcgccgctacagggcgcgtcccattcgccattcaggtgcgcaactgttgggaagggcgatcggtgcgggcctcttcgctattacgccagctggcgaaagggggatgtgctgcaaggcgattaagttgggtaacgccagggttttcccagtcacgacgttgtaaaacgacggccagtgaattgtaatacgactcactatagggcgaattggagctccaccgcggtggcggccgcaattccactttgaactggttgcaacaccttagttaataagataaagagcatctctgaaatgtgtcgtcatatgtttatgtgagtcctgatcataacagttttaaaaaatgatcttttaactcgttgtgatttcttctcccccacggccccacccagccgcagtatccacggagcttagttttctgtggcccaggagggcaggagacccggtgttgacggggagatctgaggttggccccaacttttccccacagctctgcttcaaggagtgccctgggaaggcctcccaaccccacacctgtcctgttggccaaggcgagctccatgccatgtggcatctctgccgctggccdcctggtgagtatctgtt

SEQ ID NO: 481061 - DNA, 1000 bp, Homo Sapiens
cacttataaagaaccatttattcatctgttgattttcattcattattttcatcaattacaatttttcctctcctgcatcagaggaaatcacaaaagacctgacagatttacgtagtcaactgagtgcgtaggttgctcaattagtagtacattagtgagtgctaattgataagagatcattttttttcttatataaggatatttatgacattgtaaatgccctttggaccaactcaggacaaggtacaaaatggggcccatggatggagctgtgagcccagctcaccactgttcaactctcttctctgaaacaaattgtccatggggaccctcagcatctgggggcaaaagggccaagtacacaggggtctctgcaccttcttctgggctcttggtggccttgggtcccgccatgtcagttctcacccaccctgggcagcaggcattcaggaggatcttgtcccctttcctctgctcactcagtttcctggcgtggatcctggacagaacggtgacgccaatcttcgtcaccccgtatgcgctgctgggccagccctccttctggtgcactcccttctttgtatcctccacaaacttgttcatgagccccaccagctcctcctcagtgatggtctcactgcggaacttctgctgcagctctgggctgcagcttttaagggctctgacgctcatgatgctagatacgttcaccactctccctaagatacaccacaaagcattatgtagaaaggtgtgcaacaatcccgtagagaggtgaatgccaaatttgcagggattttggagcagaaaattttcatatgagagacagttactggtatgagttctaagaggaatacgcatagaaagtgtggtggtagttgcatgaagaagttcattcctgccttcgaattttggctgagtagagtcaggtgagatttggaagagctgccctttgaggtcctggtgaaccagagccttagaagtagcacaacttaacagg

SEQ ID NO: 481062 - DNA, 1000 bp, Homo Sapiens; identical to SEQ ID NO: 308071

SEQ ID NO: 481063 - DNA, 1000 bp, Homo Sapiens
ggtgggatcacttgaggttaggagttcgagaccagcctggccatcatggtgaaacctcatctctattaaaaataaaaaaaattagccgggcgtggtggtgcacacctgtaatcccagctactcgggaggctgaggcaggagaatcgcttgaacctgggaggcagaggttgcactgtgagccgagatcgctaccactgcactccaccctgggtaacgagcgaggctctgtctcaaaaataaaaataaaaataaaaaaaataaaaagagagagacgagaaaaggaaactcagggggccagggcttaaggggttgggaaaatgcgagagtcttaaatttggttccttgcttctttgggccaggactcagagagccccccactgacacatatgcccatctgtcttgaaccttaacaaattgcaaaggccacaggctattctacaggccacgggagcccccccaaatgcaatgtcatgggggtgttcctgaagtagaggaccctcataaggcctctgaggcccagagaggggcagctccgggcctaaggtcacacagccagtcaacagagacctaatccagaggtctgcgggcaggagctatgaaaaggacagggagtggtgtttgccctctgggtgagcagtgaaggcatgagtctcacacccccggcttccgctccacagcatgtccagctgggggcccagggcgctgaatgatggccggtcctgtgggctaggggcccagcacagcttcatgagctcgtgaacctcagcagggcaggcaggaggcgccggcagcctctggccctcctccagcagttccaagaggcggcagagggcggggacatcccgctcacatcccatcatccgcaggaactcggccgaggggctgcagcttttgtcgcagtaggtgaagagctcgtacaggacgaccccgaagctccagacgtctgactggcgagagaagatgttgtccgagagggattcgggggcataccagaaaatgg

SEQ ID NO: 481064 - DNA, 1000 bp, Homo Sapiens
tttttttttttataattatatctttttattttaaaaataataaaagattccacataatgttgtcacaattttgggaaaaaagcatgtgtatctctataatctctgtgtactacaaaacaacaaagggatataaaattaaataataaccagtatttaaaagttaacttgaaaatcctcgttgataattcagcagcatgcttctggtcagcctatacagtctctgtcctgctgaggagcatgatcaccaacaggcaagatcttctggccttgaagtttcgcttgagttaaaagagctcatctcaggtaagtaacaggccaagaatggtgggcaccgtgaccactagccaacttgcaatccattctactccaaaggaccgggccagggtacagggtggactgaggcagacggtgccattcttgctgctcacagaattgctgacttggcaagtataacacctggagtaattatgtggcataagggtggtttcaagcacactgttctggagctcctttgggaagggccttttgtccccataccaggtgtagtttacagactcgccaggtatcacacatgacagtttcagataacagttgtcatccatgtcttctatcttctcaattttgatgacaggcttgggtacagggtcaagcacttgcagcttgatcttccattcttgctcattcccagtctttttcaacaccctcatgatgtaggtgctgttgtcctctttctggaccttagagatgtacagtgcgccactctgaggatcaagtctgaccctgcctttaaatttggattcaaagtacttagattttctggaatcccattctacaatcttctggtcgaaagtataaaaccaggttagttgtttgtagttctcaggcaggctctcagagatgttcagagtcacgttgctgccggagaccacggtcatatgtaccaagtgaccttgaatgctggtcaccaggagtgacagaggcagcagtagcaattccagag

SEQ ID NO: 481065 - DNA, 1000 bp, Homo Sapiens
gaattctgatctgtggaagtttgtctcccccgtgtgtgtcctgcactaaatgtccaaaccctgatacaggatgtaatgcagagagggccacaggcacaacccaggcctgacaatcccgtatgtgggaagtagaactgacccccaacacccagaggtcatgtggaaatactcacggtatacatggaactgtccggttgcttcttcattcacaagatctgactttatgacttgtagggtatagaatcctgtgtcattctgggtgacgttctggatcagcagggatgcattggggtatattgtctctcgaccactgtatgcgggccctggggtagcttgttgagttcctattacatatcctacaattagactgttgccatccactctttcgcctttgtaccagctgtaaccaatacgattctggggcaggttgtgggcgagtagaagaacctccttcccctctgcgacattgaatggcgtggattcaatagtgagcttggcagtggtgggtgggttccagaaggttagaagtgaggctaggagagaggagagagcatcggtcaatattgggacctatgcattagggtggaaaaacagggccctgggtcctgagcaggtctcttcacccctccacgttggagcgtgtgtgtgtgtgtgtgtgtgtgtgtgtgtgtgtgtcctactgagtcaaagtcagcagtgtgacacccccattccttcagcacctttgaccttggcatttccctgtgtggaatgctcttccccaggggtctgcatggctccctccccactggcctcaggtcctgctcacatcagggcattcttgggagatcccttccctgacaccccctctacagaccctgggtcttttctttctgacctttccctgctctgttccttccagggctcttgtcaacacctgacctcacattctatatctctttgtgtgtgtgttttcctcttcatgacagcataagctctgtgatgactgagacttgtctga

SEQ ID NO: 481066 - DNA, 716 bp, Homo Sapiens
  misc_feature (166)..(166): n is a, c, g, or t
agccagtaaagctctgagcatacaggaaacccgctaagaaggaaggcctgactcacagctctctagatatgaactcctgctcaggaccttgccaagatgcaatggaaacttgggcctgctccctagaccccacccaggatgccaagaacatttccaggtgaatganatcctcacttctggtgctgatccaatctgagagagaaactccatgcagaggccattgctagatgggaatctaaaggacccccacaccccatgcagtgaccatcccacaaggcctacaagtgagggcagtgtacctaccagtgttgatggtcttcttgatgacagtggcgacctgccccttgagcacagagcccaggatcttgacaatcatgatcaggcaaccacagaggaccagcagggagagtatgagcaagatggtgcccacagcaagatccgggaggtggaaattcacaaagatatgctggcctgaaagaccacaaagaatcttgtcaggagggcatggagccaccacggctacagattgttatttattcccccagatcctgtctttcctacaaacagattcctggttgttagtttaacagatggcagccccaaatcaagacagcccttctcagcctccttcgcagcaaggggcaccactgaaactatgtcataatcagtgggatcgcatgaggctggaagatgaagtgatggctttaaaaatcaca

SEQ ID NO: 481067 - DNA, 1000 bp, Homo Sapiens
ttttttttttttttttttttttattaatgtatttatttatttatttgtatctatttattttttgagatggagtcttgctctgtcaccaggctggagtgcagtggcgcgatctcagctcactacaacctcaatctcctgggttcaagcgattctcctgcctcagcctcccaagtagctggcattacaggcgtgcgccaccatgcccagctaatttttgtatgtttagtagtgacggggtttcaccacgttggcctagatggtctcaatccgttgacctcatgatccgctcgccccagcctcccaaagtgctgggattacaggtgtgagccaccgcacccagcccagtcagtgtatttatttaagtcatgttggaactgtttctcatttggttctgtgttgtacagtctgaaattagaatattattgttaacctcaagaggattctttccagatgcaattagatttcttaccactgattaccatgaaaacatgaatcctgggatgggaggctgcgtgcacctctcctggactgactctaggcaagctcctcacctcttagcatgtaggtcacacggcgtggagactcccgactcccgacagacactgtcaggaacgcaccgatacgcctgtttggcggggagggagagtggcgggggtcggactatcttcagatctctttttttccaaggaatggtcaccagctatttatgacatagaaaagttggtattccagaaacaggaaagtaagtttacttgaataatttcgtggagaatggaaggcagaccttgccagtgtcccccacccctcactaactgtgatacagcaaatacaacaatgcatgggtgaaagaaccacaggccttatccatgcgtccttcccacgctggccattgcaggtcttaccgttgctgcttatggtgaagctgtcgatgggcatagaatcgggtcgtgtatagtatcgggttgggtggtttctgcgcaggcccattccagggtttcgg

SEQ ID NO: 481068 - DNA, 1000 bp, Homo Sapiens
tttttttttttttttttttggtcactttttctttttttttttttttttttgctcactctgtcttccgcgctggagtgcagtggcgcaatgtcagctcacgataacctctgcctcccgggttcaagcaattcccctgcctcagcctccccagtagctgggaggctgaggcaggagaatggcgtgaacccgggaggcggagcttgcggtgagccgagatcacaccactgcgctccagcctgggcgacagagcgagactccatctcagaaaaagaaagagcagcagtgccaaagggtggggacagcaggcaccagcgtacatgtgtccagctcccctgaaagtcacttcggatctgttctgaggcacagctgttgggggctccatgcagaggtggccagatggcaagcaactggaccttcccgtgagcgggggtttctgggaagaggagggggctggggcttggtggagcacgtgcggccatcgcagcattcagcttgacccaactctcaggcccaggaaatgccaggattggttcaacagagaagcgcccatgcggggggctccattctggggctggcctggcagctggaagccacgggtccctctccaggcatcaaactgccttccctctcggtctcttgctgtgtctgagccaacagccagatccaaggtgacccacagggctctccttctggaaacagagacctcctggggggcctcaggagggccactgattccgtggtccctgcctgggtcccaggggaggcaccaagcccctagctgtacaggagcctgaggcagagaacgggccagctgtcccactggccgcaaccccggggctatgcactgcccaggcccactcaggaggatgctctgagcctccctctgctgtcgaggaccagagacctccatgtcctggcctgtatgcctcttcaacacagggagcttcccaaagtcaagcagctccccagaaagcacaccccatgctggcatcaatctggg

SEQ ID NO: 481069 - DNA, 1000 bp, Homo Sapiens; identical to SEQ ID NO: 308075

SEQ ID NO: 481070 - DNA, 1000 bp, Homo Sapiens
aaataatgagaattagttcatgttaggagtgcatggatctatgattccacccaacactcccccctcaagatcttacggggtagacgccatttgaagcaaagggagtgtgatggttgatcctggtataacatcaggagctttaaatcccaaaaatgtggggttgctcatcttggcccagtagtttgccgctgttgctaagtttgggaacattcgtggtgacagctccccaataatggggtggcaaagtacacccccaaactcaaaatatttccccaatgcctttttaaccattgttttttttctcctcaaagactgggatctcagacacaatggcccgtagagcaatggagccatccatgcactgatctagaaacattctcacagcattaataggttgtcatctgtgctttcttggcaactaacttgacttgcgtagcttgtgtagaggggattcaaagtctccaaatagaagtgtgaacattaattctccaacccatggtcttgagctgatccaacctatggctgattctgcattgcagctgattagcagatcagcactctcaccatgtgaaagtcttccaatagatgccatcattgccttgaatcgtctctgaacttgaagactgctggtgcaaatcttatcacttgatccagccgcaatgcctatcaaaaggtcacagcagtggcggagaactgatgacttctcaaggccaataaagttaggcatatctttgaatctgctagcataaggagtacccctttcctcgttctcattcccaaccacagtattagacctcttgctcacaccaacactcagtaatgcctggtgtaacccatcaaatatgaaacacaagaatactaaacttggggtcacagggtggaaatgagatttatgtgctgggtctagcatagacttggctgcttttttaatgtccttaatatccccaatgctgggttggggttccaatgcatccagtggatactgtctgtttttcccaga

SEQ ID NO: 481071 - DNA, 1000 bp, Homo Sapiens
ctgtatcctgccaagatgttcatgaatgtagacttgccagcccctgaggggcccatgatgccaatcagctcccggcggcagaatttacctgagaggcacttgagaagggtcttataacctgcagtgaggtggggaggaatttttagtcaggctgcagtgaacagaggtacccccaaaattcttaggagcagccatggctatcagtgaaataggtagcccctactcagtgtgattgggttaggatggaggaacaacccttatagccccggcaggaacccatccctctcatcccgtccccctagaaacgaccaccactaatatcaaagtaccagaggcaacaatcctcttctgaaaggcgtgggaaaatccacacatctcatggatgggcgtggagaggggatcaaagctgtagaagaccctggtcctcttctgtaatcacagtggccactgtctcgccccctccaggaaaactcccactactacagcccgagctggctgcctatcccctgtgtttccatagcacctctcctatgccagcatgtttgttacttgatgtgcctgtcacttgaccagctctcccagcctcttagtcagtgagctccttgggggcagttctcactcatcttggtaatctcagcagactgtctggcctgtagtagatgttcagtaagtgtctgttccacgagcgtgagttctcagagcttttccctaattcagaaaaagccttcttctttgcgctctctctgcctaccaggcttgtttctctagcccctacatggcccagtaaaatctcacctttcattcattcattggaaggcagcatatgcatttagagcacggtttggagtcaggtggatctgggttcaaattctggctccacacttaccagctgtgtgacctcgggcaagttgcttaacctctctgagctccaggtccctcatctgtaaaatgaggatgatagtacctatctcatagggttgttgtaaagattcaatgagat

SEQ ID NO: 481072 - DNA, 1000 bp, Homo Sapiens; identical to SEQ ID NO: 308077

SEQ ID NO: 481073 - DNA, 1000 bp, Homo Sapiens
gaattcaaatggagggtggaaaagaacaccagaaagcaataatgtaactatcggcattttgtttagttataaaagatagtgtgatagactgaattactgaatcaatcaacttatgatttatgtaaacatttcttgtataagtaaatttctaaatttctattttttttaaattattcacattggtgcaatttactcccatgtataaaatgtggttttggtttacaaatgtagtgggagaaaaaaaaactactttattttctatagatacacatacatatttagaaaatatattctaaatggttattttttctgactcttttggacatactatcacaatacttataatatatgggggaaatatgttttttgtaatgtctctgattatctaatgtcagccataagactgctcaggtggagaacggcttagctaaaccctcatggccccagtcaaacacaggctgcctcaaatctgatcaggcctattaggaaaaaaagaaaaaccaaacaatacaatggcaaatgtatattttgggtaaactgagggccaactgcatcaccatcatgtcccttcaatttcctaagcagagatacattacttcatgtatcaggtatcatggtaccaagctcgaagagcttggaagaaatagtcctactctgacgtaaatctgtgaacattgtaaacttgcaggttaaaaagtattctcacattaattttagttctccaactaagcatctttttctataaaaactttggctaacattgttgaaatactttgaaatattttggagatgaaatcagaagatattttcgtataaaatgtctaagatgatgatttaaacactctgacacagggagttgaaatgcagttcataagaaaaaataaaaccagctttggtacaaatagaacaaataattaaaacatttctgtgtctttatactaaagtctaccccagagaccaagcaaagctaagcaaaacggatcaaaccaagccagagaac

SEQ ID NO: 481074 - DNA, 1000 bp, Homo Sapiens; identical to SEQ ID NO: 308078

SEQ ID NO: 481075 - DNA, 1000 bp, Homo Sapiens; identical to SEQ ID NO: 308080

SEQ ID NO: 481076 - DNA, 1000 bp, Homo Sapiens
tttttttttttttttttttttttttttttttttttttttttttttttttttttttttttttaatcagagtaataactttatttccaaattcacttttacagcaacagtcagtgtaaatcatttgttaaaacacacaatacactatatagacattcacagacagaaagctaagctaagatgatttcatgtccctccccccaccctcagaattaccgaagaaatcatgggacttgcaagtgccagaaatagtcctgctcaacatggcaaactcatggggctaagtctattaggaggtgaggctctaggccagtgcccagggtaacccttttcaaagctgaagagaaatcagaagttttatgaagccgcaggtctgtagatgggacacgcaggtgatcacctctgccctcgccccgacctcgtggctttacttggagaacaaagatgaggagggtgaagcgagtgatctcagctccaaaagcacaggctgtgtgtctggagccagtgtgagaggtggcacagaggtgccaacggcttagagggaaggatgccaaggtcttagggaggcatgattgtgggcttaggacccctgaaagagggcagcaggccaaagcaaccagatgtccatattcctacgcctgcacctggctggggagggaatgaactagccagctgcctgggaaagcctgtcagtggaaaagagaaaccccaagggcctctaactccgtggctgctccctccctctagcaaatgtggttgaaatcatgaaaagggttacgaggcagtttaagtgctgcaccccaagatctccctttgcccatgttaactatcttacacattcctcccccctccccccatagcacaacaagcaatagcaaacaggatacagtctcaccactgaagtcaatttaaatggaactattgataaagtgagtcagcagcttgaaggagccggcatacagtatatcctatctagcccacccaaggacactggctctgcagg

SEQ ID NO: 481077 - DNA, 1000 bp, Homo Sapiens
tattggtagaggggccagaaacaaaacaaaaggggggtaatatgaacaaagtattactcaaaactactttccgcttcctcctctaaccaggagaaaaggccagaaagaaaacagtaatttcaggatttgagttccctatctgaaggcagagggattggactgtggcctttctcctttaccatcatcccacttccaagacattgttaggaagtaggccagagtctcacttagactctcctttcttcatcctcttagatgtcgtctacaagtcaagggcaaagatatctccaaattattttagctcttgccaaggtttgattttttttaagttaatgcaattctttaagactaatctgtaactaggccccaagcctgatcaggacaactctaggacaaggcagtaacagttccaaggcccaaactctatggtttccttaatcctctaaagtatgtaatctaaatcagtctatacagtctaaatagtaccttctgggataaggattgatacatgcacagcaagggtgaaagaatggacaaggaccaactccatccccctgtgtgtcaatcagcctttactgctcttctacttaggtcctaaccggcagtattgaaatggaggtgggaagatacaactccttatgaagtaagacacagcaagagggcacactagcaaagcagtcctatataggagaaatgcttataggcatgacactgcattttaaatacaaaaaattaagttctcttccaattccaatctcaacagagggagccataagaaagattctcctctgagtcttctacaaaaacaagggaaaaagacagaaaaaaaaaaacagaggccaagaaaaaagaaattgggcaggcttcggaagcaggagcattaagagctgaattgaaactgttcaatgtgacagctggagtggcaagcagcacctggggcaccagataggcagtggagcaggggacaggaggaacacagggccaagccagacagatgagg

SEQ ID NO: 481078 - DNA, 1000 bp, Homo Sapiens; identical to SEQ ID NO: 119900

SEQ ID NO: 481079 - DNA, 974 bp, Homo Sapiens; identical to SEQ ID NO: 308082

SEQ ID NO: 481080 - DNA, 1000 bp, Homo Sapiens
catgttagccaggctggtctcaaactcctgacctcaggtgatccgcctgcctcggcctcccaaagcccctgctaatttgattgctcccattgagttccctcccagctccacagacacaggattggacaccagagttctggtctaaacagctttattgaccagatgagaaatcagcttgggtacagcccatgcctgcagccctttcagtgggtggctccagatagtgttgtcctttcagttgctgggagcggtgaggcccagccctttccccttcctcccaccactattcctaacctggggcctggcaggggtggagtgatgtgatctaagggtccctggagaagggtggagtggaagaggcagggtcttgggttaaagggaagattctgaggtctcagggcaaagggaaaggtgtttggatgaagactgaggcagtgcctacctccctccacatctgaggatcaagcaggtgtggcaagaacagagccctggcctgggctctgctggccgcagcctcaggagccagggttaaggccagagataaatgaagatttgagccattgataaatgccaatatatgtttcaggtatttcattaggatcctcccatcaagcagggaactagatgtttgagaagatcaaacaacatcctgactttggggtccttaagacctgggttattctcctcccagtcctagtgggaggctatccattccacaaagactcaaaggcaagaggcctggagaagcaggggctcctaggaccccgcctgcatgcctctctgcctccaatagtgactccctaagctgggactcctcaggcttactctgagggacaccaggaagctcaacctctttcccacagaggagaatctctgagatccaaaaaacccagccttcccccctcctcatcttggtcttgcttccctctccctccagcctgttgctgctgctcctctgggtgccaagatgtgtcctcaggtgtcttggtcagctgatgat

SEQ ID NO: 481081 - DNA, 1000 bp, Homo Sapiens
  misc_feature (91)..(99): n is a, c, g, or t
gatctagaatacacctttacccctgaacgagcgagagtacacaaggcctttgactcagacgaaattaatgcatgaacacaaaggggagctnnnnnnnnntctagaagttggactcgaggaagacttcagaaagtacttattggcctggaagagagcagtttgatggactgggaagagtactggagtggaatatgacctatgtgtccagcttctttcatgtttaaagaattgcttacagccctgtgtcaacccatggaagtactttgtcttgtctttgagtcataaatctttgtaagtggtatttatgaattaaacaccaactatgtgcaatacaaattattttaattcttattttctggctgcttttttttttttgtattctttctatatagagctctacggtggtagggaaatacctttttcttttgttttgttttgattgttttcttcatccccattgctacatatagcaggcgtatggtaggtgctcaaaaattggtaaggatcctaactcaaggaagttaagagtctctagtggctaataattggaggctattgaaatggaaaataaacttgtggctgggtgtggtggctcacacctgtaatcccagcactttcggaggccaaggtgggagggtcacttgagcccaggagttcgagaccagccctggcaacatagtgagccccttctctacaaaaaagtgaaaaaattagtcaggcatggtggtgcgcgcctgtagccccagctacttaggaggctgagatgggaggatcgcttgagcctgtgaggtcgaggctgcagtgagctgggtttgtgccactgcatccatcctggacaacagagtgtgaccatgtctcaaaaaataaataaataaaataaaataaacttgcactatgagccggtagtctcacttctaggtcgctatctttttaaaattatggcatgtcaggattagcgtatatgtacaatgttattctttgcagcattgttggtaaaagc

SEQ ID NO: 481082 - DNA, 1000 bp, Homo Sapiens
tcaatttgacaaacatttattgaacacctctaggtgccctataccagttcctggggacacaaagctcagtgaccctgtgtccctgtctggggggagaagtgtgtggctcacagcccagtttccctgagagcagaggagcaggaagctcagtatttcttaggcaggccgtcaggtctgaagcggtcggggtctttgccactccggccccattcctcagctttctcgttggacttcgagtcctccaatacagtgctgctgtttccaaataaatagtagtctattaatccctgaagatagaccctggaacggctgcaacccaaagaaaggagacaggagattaatctcttgactcacctgctcacctgagacagctccacctgctaactccctcctcttctcccacccaagtaatgactgagaggaggctggaaaactcaaggaaaggggaagaaaactatcaatcttcttgggcaaaggcctaagtctactgatactttgcgctctgcaacagagtgctttccctttttttttttttttttttttttgagacagggtctcattctgttgcccaggctggagggcagtggctcaatcatgggtcactgcagcctcgacctcctgggttcaagggatctcccacttcagcctcctgagtagctgggactacggtgcatgccaccacgcctggctaatttcttttattttctgtagagataagagtcttgctatgttgcctaggctgctcttaaatccctgggcccaagagatcctcccaccttgtcctcccaaagagttggaattacaggtgtgagcccctgcacccagcccctgcacccagcccctgcaacagtgtgctttcaagacctctcctcagttcttactttcccttgtgggtgaaaggagacatgtcttcaccagccttgctctggctctgccagccacccagaccccaggagtatgtggaggaggggaaagagccacaggttctcctgactctcaa

SEQ ID NO: 481083 - DNA, 1000 bp, Homo Sapiens
atactttaaaagccaaatatatttttaaaagatcatgcttataataagtaaattacacattaaggaaacatcaaaataaagtagatgaataaaaaggcacactcgaaaaatttgggcgcagaaaggacagttctttttgttttgtttctaatgtcggaagaaaaagaaagagatatattaaaatcattgttttcaagtgaaggtttctgtcagttgaagtagttagcaatggcttcttttctcccgtgtccaaagcaggctcttcctgcgctgacttctgaggaggtgttcagtcctctgccatgtataggcgatacatcaaggcgacggccactgcagagatggcagggatcacccagttggtccaccaactggaactagaatcaatagtagtgataagagtttccggaggcttgtttaactttggtctgtcatcctgcaatgaaaagataaggcacattatggaatttaaaaatctatgaaagtaccacttccaaaatgctgactttgagactttttaaaattataattcagtaattaccatttcagattcaacatttagctattaaacacaaagtttgatccatctgatttaacagcaaaaattagtagcagattaagtgccaagagatattttctatctagagttccaaagtttcgaacagcacccatgacagctctctgtacatgctgatgtgcacacacatttattagactcagattgcgacacgtaattcagggaggagctgaagactgattcttcccttctgtcctctcaaattccatttgagattgtgcatgtatctcttacgtgtatgatatcttcagttaagccctgcagtctcccagttttagagtcataaactatttcaacttcaggctgaagctgtcaaaaatacagtgtgtttaaaggctggccagggggaacccagtgggcaggtgaagcagaagtgccacagtcagggcccgaaacctgacccacagctggaaacaaggatgg

SEQ ID NO: 481084 - DNA, 1000 bp, Homo Sapiens
ggatccactaggcgaagctggctgggctctgagtcaggtggggacttggagaacttttatgtctagccagaggattgtatatgcaccaatcagcactctgtgtctagctccgggttgtgcatgcaccaattagcactctgtatctagctaatctggtggggacttggggaacttttatttctagctaaaagattgtaaatacaccaatcagcactctgtgtctagctcaaggtttgtaaacacaccagtcagcaccctgtgtctaactcaaggtttgtaaacgcaccaatcagtgctctctgtctactctatctagctaatctagtggggactgggacaacctttatgtctagctaagggattgtaaatacaccattcagcactctgtgtctagctcaaggtttgtaaatataccaatcagtactctgtgtctagctcagggattgtaaatgcaccaatcagctctctgtaagtggaccaatccactgtctgtaaaatgggccaatcagcaggatgtgggtgggggtcagataagggaataaaagcaggctgcctgaagtagcagcggcaacctggttgccatcattcttttgctgtttgcagtaagtcttgctgctgctgctccctcattgggtccacactgcctttatgagttgtaacactggaaggactgcagtttcactcctgaggccagtgagaccacaaacccaccaggaagaatgaacaactccgtacgtgcagccttaagagccgtaacactcactgtgaaggtctgcagcttcactcctgaagccagcaagaccacgcacccaccagaaggaagaaactctgaacacgtcttaacatcagaaggaacaaactctgaacacaccatctttaagaactgtaacactcaccgtgagggtccacggcttcattcttgaagtcagtgagaccaagaacccaccaattttggacacaaggtgacaggctgagggcggtggctcggtcctgggttttc

SEQ ID NO: 481085 - DNA, 1000 bp, Homo Sapiens; identical to SEQ ID NO: 308083

SEQ ID NO: 481086 - DNA, 1000 bp, Homo Sapiens
gaattccgtttttttttttttttttttttttttttttttttatttaaaatcactgagattgtgatagtttattacagcagtaataggaaactaatataggaacagacaagccaggcaggaagaaggagacaggtgtatgggcagacagtctggagggcaggcaggagtttgggaggtgggtggagattcagggatgttggggtgttcagacccaacaccaggtcgtgggggtgacaaagtccggcagagtcaaagcagtgagaaaagacagtttgagagagaaagtgggtccagggcgccaaagctaaggatggaggctgtgaaggccccgagctctggaagtgcagattatttattggtgatcaaacaaagaaacaggtggtgagaatggggggtgggtcgaaagggcatgttgcattaagcacacaatttacagctgtgacggtttagcatctgctctgttacttgagataatggagagcaggttcttttaactcaagatacaattgatcctgggagagcaaggagcaaggagccagcaagtccagacacattccagagccacgagccctggattctatccaagccacgaggggttttatgccccgggcttagattatggtgcgtcagggtagccttccacccttcagcacagagcttggtgttccaaaggccacaaggggttttagaccctggatcctggacatgattcaagactcttttacattatgtcagacatgcaagctcggcctcagcttctcccaacactcagcttttctcccaacaagagatacaggtgggtaggagacaggtagacaagcaggtagggagcctggagaaaggtgagagagagaagggcaggcagactgggggacagcaggcaggtgggaagaagggaaggtgggcagacagaaaacaggatatgggcagacaggaaggggacagaagcgggggtcaggaagacaggacggcaggtggaggccctcaaagctggtccttg

SEQ ID NO: 481087 - DNA, 1000 bp, Homo Sapiens
actggacagggttgggacggagagcccgagccgggacaggagccgggcgcgggtactcacggtgcatcgcggagaaggggtctgctttgcagtgcatatccatggggaggcagaggagcgggagcagcgcggccgccgccgccgtgtcgcctctcaaactcaacttcaggacttgaggagaaaagggagggacggtgggggagggaggatgagtgaacgcccggctgctgcggcgcgcgcgggggcggggggcgcaacactgcgctccccgctggggctcctccgggttggccggagcttgcaaccgcagtagccgcaacttgccactgtcggggctcggggctgggcggtcagcagaatggccccggggcggtgggccgggccggggtgcactgggggcgcatggctcgcgctgcagctgcagccagggctgaagctgggcgggggaggcgactcgctcagctcccctggaacctgttcatccgagaggcggtggtcggagagcgcgcggggcgggggcggtcagagggcgccgggaggggagccgggcctctccaagtgctggcgagttggcgaagttggcagagaagtagcaatcccggggatgtccgaggtggcgcctgcgggaggggagcgcgcgggccaggcccccgcccccggaaaaggcaggcgcacgccgccgcggccgaagggccgggagggagggagggagccgagcggcgctggcagctctgggctggccccaggtgggttgcggctgctagaagactcggccggagactggagcctcggctcccggtgtgtgtctctctaaaagctgcaaagccccctccagacctcctccccctccccgcgccgggagatggatgacttgtcagacaaaggcaatagattccaccactctgtgattcgccagcgctggagccccgagcttcggcgaggagggccccgagcctgtcactccggtgccggcaaggggagggcaggggagggagaaatg

SEQ ID NO: 481088 - DNA, 1000 bp, Homo Sapiens; identical to SEQ ID NO: 308086

SEQ ID NO: 481089 - DNA, 1000 bp, Homo Sapiens
aatgctatccccatcaagctaccattgattttcttcaccaaattagaaaaaactactttaaatttcacatggaataaaagaagagctcatacagccaagacaattttaagcaaaaagagcaaagctgggggcatcatgctacctgacttcaaactatgctaccaggctacagtaaccaaaacagcatggtactggtaccaaaacagacatatagaccaatggaacagaacagaggcctcagaaataatgccacacatctacaccatctgatctttgacaaacctgacaaaaacaagcaatggggaaaggattccatatttaataagtggtattgggaaaactggctagccatatgcagaaaactgaaactggaccccttccttacaccttatacaaaaattaactcaagatggattaatgacttaaatgtaagacctaaaaccataaaaacccaagaaggaaacctaggcaataccattcaggacataggcatgggcaaagacttcatgactaaaacaccaaaagcaatggcaacaaaagccaaaattgacaaatgggatctaattaaactaaagagcttctgcacagcaaaagaaactatcatcagagtgaacaggcaacctacagaatgggagaaaatgtttgcaatctatccatctgacgaagggctaatatccagaatctacaaggaatttaaacaaatttacaagaaaaaaaaaccccatcaaaaagtgggcgaaggatatgaacagacacttctcaaaagaagacatttatgtggccaacaaacatatgaaaaaaagctcatcatcactggtcattagaggaatgcaaatcaaatccacaatgagataccatctcacgccagttagaatggcgatcattaaaaagtcaggaaacaatagatgctggagaggatgtggagaaataggaacactttcacactgttgggagtgtaaattagttcaaccattgtggaagacagtgtggccattcctca

SEQ ID NO: 481090 - DNA, 1000 bp, Homo Sapiens; identical to SEQ ID NO: 308087

SEQ ID NO: 481091 - DNA, 1000 bp, Homo Sapiens
aagcaaggacattcggcgagctagctgaggttttattttggaccaaaaaaaaaaagcaattgaattgttttgtagctggaggcatgggcaaggggggtccccaggtagtaaactccccaggtgggctgagggctagggctgagcctcaggtgggtctcctgttcccagtgctaccctgcatagcggcctccttcccaggctctggggcagcgcaggaggggtaggctgggaggggctgccgcagctgttcacttgggcaggacgtcagaggactcagacaccagcttcccatcacgtgtctcgatcttcttcacaaccacggccctggaggagctggtgcggctgaaggagctggagcccgcgccagagccaaagctggagcccaggctgtagctgaggccggcttgtgagcccccataggccgagctcagaccacctggtgagggacagaggtagccacatgagtacagaagcccaccatggcaggctccatgcccttctccctgctcattcccaacatagccccagggatggaggttaacccagctctcctgatcagtgattgcatggttcactactccagaactgtcagggaaaaccaggagcagggtggaaaacagctgccatatatatagcctgtgtcagcttggacatttagctgcacctcagccttcctcaactgaagacgtttacaggtgtcatataaaaaataaattacagccaggcccagtgtctcatgcctgtaatcccagcactgatcacaaggtcaggagttcgagaccagcctgcccaacacagtgaaaccccgtctctactaaaaatacaaaaattagcatgggcatggtggtatgcgcctgtagtcccagctacttgggaggcctgacggaggagaatctcttgaacccaggaggtgaggttacagtgagctgagatcagcactgcactcagcttggtgacagcgagacttcgtctcaaaaaaattaaattaaattaataaata

SEQ ID NO: 481092 - DNA, 1000 bp, Homo Sapiens
  misc_feature (48)..(48): n is a, c, g, or t
  misc_feature (88)..(88): n is a, c, g, or t
tctgtaaaatatagttagttgtatattttgttgagaaagaaaaaatgnaaattaattaggtcgacagaaaacagtttttatttatganccagggttttgtttatagttccctgtgggtgagtaagcacttactaggatcatttgtgggacatttattttcaagtgttcaacaaagaataactattaattcagtttatgcaacaaacttcatcaactctttaatgctcatggataatcagcaaataaaatttactcattttattactaccatcatcaacctgatggtaacacctgatgatttgtttacttaaatgataatcatgatcttcattacaggctattacataaactgtttttattgagtcaaatgatgaattatgcattctaacttttacttaagttaatcattgagtgttaaattatttgtgggacttttgtacacagctggtaggaggataaattggtatagccagtttggaaaactttttggcagaataaagctgaactacacacacacacacacacacacacacacacacatacacacacacacacacacacacacatatacactctatgacccaacaattgcaatttgcaattataggtagatacttgaaagaatgtgtgtaattttttgcacaaaaagacatgtataagaatatttagacactatagtggtaatcggcaatctctttctgtgaagggacacatagcaaatatgttaggtattggggatcagatggtctctatcatgaccaaactctaccattttgtagcatgaaaactgccataggcaatatgtaaatgaatggacatggctgtgttctaatcaaacaggtgacaggtcaggtttagcccaagagctgtgacttgctgacttctgttctatagcaaaagaaacaaataagaatgaactacatctatatgcaacagcatgcatgaatctcatagacagtgttgagtgaaagaaggcagactggacaaagaatatactctt

SEQ ID NO: 481093 - DNA, 1000 bp, Homo Sapiens; identical to SEQ ID NO: 308090

SEQ ID NO: 481094 - DNA, 907 bp, Homo Sapiens
ggtttctgcttttttttttttttttttttgtatatttcctttttaatgtatggctacttttgttatttgcattaatttatatccttgattatacttaggctgaatagtgagagtaatgtgtttgctgagagagaaacagttgcctaagaactggtgggaaatggtctaggagagtaaagtgattggtggaaaatcttcattttaaagaaaaacttctgccaacttttatcattttttctcataccttctgcttgatgatcatctcgttgatatcctcaaggtcacccaccatcaccctctgtgattttataacttgatcaagcagagaaagccagtcggtaagttctgtccaagcccggttgaaatctgccagagcaggtacctccaacatcaaggaagatggcatttctagtttggagatggcagtttccttagtaaccacaggttgtgtcaccagagtaacagtctgagtaggagctaaaatattttgggtttttgcaaaaaggaaaaaagaagaaaaagaaaaattagaaacacaagctaaagagccaatttcaataacaataagtcaaatttaattgaagagtaacaatttgagccaaactcttattcatgacattatatatctttttctaacaatgtggatactttgtttagcaatacatggtagaaaatgaaaagattcaaccttttcattaatatacatttaacaattttttaaaaaacgattttgctcattctcatgcctggacaagtaacttaagttaaataagccttctcagtaacaatcatatacattgtggaagtggtaaagaaaacaaaagttttcagaccttgccagggaaataaattttacttattttttttttattcaagaaaaaacaaaggcaaaacaagatgggataag

SEQ ID NO: 481095 - DNA, 1000 bp, Homo Sapiens; identical to SEQ ID NO: 308091

SEQ ID NO: 481096 - DNA, 1000 bp, Homo Sapiens
tttttttttttttttaaaattaagaaaaggaatcaatttaattaaataccaaaaagttttacatattcctgaattttcaaccagctacaaaaagcatggatttttcttattagaaaacaaaactattacaaaaaatttaaataaataaatagctgccataaaatttcaacataatatatagtcaactagttctgtgttatggtcagttaatagaaagttagcgggaatgatgatatgagcaaaagtaaacagaacaaagaagaaaaaaagataggaaaaagaaagttagacagagaagagaaaaataaagaaagtgctttattgaatgagctaattacatgaggtcaccaagaggaacatcctctaactgaggcgctgtgatgagaacaacacccgatgctgtcattgtcctggtgtcttcctcaccctggcgtaaaggagatgcccaagctctgcacaggaaggcatcgtcggcaagctctcttctccgacactccaccggaaggatcacagagctgtggtcttggcctggatggatcgcagctctctccacctgagggcccccagctggagggaccggagaacactggcgtctggcagccccgtttccactcctaccaagaaggctcaaagacgacggtcagctcaggcttttcttcttgaagtgtttctaacgcactttttgtctcataattgaaatacatttcagacaaccccaggttctgcaggaggcagctctgctgtttcagcacttcacagaacatcatgacccccaggtcgcccaggtcattgttgcccaggctcagctttcgcaggctctggctggaggtcagaagtgtggaaagatcccagcagcagtgtgacgtgaggttgcagttgtctaattccaacacctgaagcttgcagtcggggtgcaagagtccctcacagagtagtttgatccccttgtctccgagagtgttgcctcgcaggtaaaggtgcgtgagattctgattagtgc

SEQ ID NO: 481097 - DNA, 1000 bp, Homo Sapiens
aaagaaatttctgctaataaaaaacatcaaaatattaaagcactcacaagcatagccccaatcagctcaggaggctgtaaacttcttcttggcctaggcctatatgttgatcttcctcgccaactcatatttcactctgcaaacagaatactgtgattgggaaagtgtgtttgagaggatagctgtatttgaccactttcatggccaaatgttaaatttcagtttttaaaaaagtttggaaataatttgaaagtaagtcccagggcaactagaagtgtgtacatcttctgaatcgaatgcttgcatagccacttaagttgggcaatctagcagagcaatgtcttaatgctcctggcaaaagatacaggatatttctgatgagatttggtttcacagttggattctccatagtggagacatttaagtttatacagctagagaattaaaactgcagtgaccacggctttcgtcacacacccatttgtttggacgatttccctccctaaaatcaaggttttgttggaaagcacagtcccgcccattcgaacctccagggtggagttgagaagttgtgacacatcactggacgctcctcgctggacatttctacccggagctctacagacctcggggtcgcggtcaccagctcatagcattcccacttcccaggcccctttcttaccgcttacacagcccattcctgggtccctaccaagaagtctggaatctgtcccattgggagttccaggcactttcgggactcagatacctccaacagcaccccgagcattcaccctatcttcatctggctccccttcactccgcggcccaccttccttatgacctggaagctttttactctctgaggccacagaccacgccgcctgaccctctggaagcccgctcactcctcctcacattcactcacatttcagttcctgggaggactggcctgcggacctataggctgcgtctcagtaggagagaaagagtccagacg

SEQ ID NO: 481098 - DNA, 1000 bp, Homo Sapiens
ctaggatgattgagtgtttctttaaaaataaaaaccccacaaaaaagccagaacaccctacccaacccagcccagtgtaacaggttagccattaacacagaataaagaaggtcccagccacacacgtcattactcggcagagggtgtccagcctggtcggccgacgtcacagtggatggccctgcgtggctgggacacagacagggagcaggcatggcacctgcgccacgcagagcagcaaggctgagcatgaccactggaaataaataaacatggtgccgacagcatctttaaattagtaagacgttagcacaaaacaaaaaagcacaacgactgaaaatgcacttgcttgttgtggtgggttgtgcttgaaaacacctgaagcccacaagtggaaaccgctggggacgtttgtcagtggagtgtggagaaaaagggacggaaaaatcaagtcttctgagacagtcccctgcggtggccctggtccctgtggaattccagcacagcaggagggggagggggaagcaggcctcagtcagcaccgcgggacacggcccctaccttctgaagtggggtccccaggctggagtggggcacacagcaccaaggatcacagactggaccccccaccaaccttctgcggaggagctcccaccccagctcagacgcccagaagagacctgcgcagtgtgaagacggaccccagcggccccagccatttcactagcagctactttccacaacagacgctggcagcccccatgctcgcccacagccgcagcagccaacaggaagtgcgtgccgtcgagaggccgccggctccctgtatccttgaggcatgtccacctcccagaacaggaggttggaacagaacggcatcccgaggacccctagccgaggcgggaaggtaagaggctgacgtcgtgcgtgggccccgccggccccagtgggaagcagtggtccgtgcctccagggagcacttctcctggacctggggccg

SEQ ID NO: 481099 - DNA, 1000 bp, Homo Sapiens
cggaaactctgtctcacaaggtgcgcaacactcgccgcgcgcaacactcaccaggaagttgatgtcggccgggcgcactaggcggtagctgcacgtcgcgcaatcctggctgcattcggcccgcacggtcgccaggagcccggggccgagcaacagcagccaagtgcaaagtgtcaggaaccgcgccatggactgcgaggagagagggacgcgtgcttcgagcctgcctgggcgcagaacggggtccctcggcaggaccctcgccgcgacagcctcagcaggggatcgtcgagcaaaagcccgcaggaatgctcctttctggggccccgccctcccggccgacagcttttaggtagacgtggaggcgactcagatcgcctcgcggttcccgggatggcgcggtcgcccccaacgcgaggctgcctggggcacccggctcttttcctgggcgtccgcggcccagggcaagattccggagagaacgccgcagaccaggggcgagagagcgggagccgggggaggcaggacattgactggggtcacaaagaagaaccagggaacgctgttggggaacccatgcaatgaaatgtgaagggaaagagggcgggcagacgtccccaaacccgctcagcaaagacaagcttcgggcaaattcactcacgttgacgctgttcggatggagcaggccaattggaaaagccgggttcagacacgactctagagggaagagaagaaggcaagtgtgaggagggcgggcgtcggggagaagcgggcccgggtgtgctggcggacgtagggcctcaccgtcgcggtcctcagcgtctctgcggggtcacgggccaggctgcggggctctgagcgcctgcctcgccgtcccggggcttaacggctgctggagccactttataattagccccaaaccgaaggaggcgcgcgcgccccaatcgccggcgggctgcagctgacgcaggccctacgccagccccgcgccgacgccttc

SEQ ID NO: 481100 - DNA, 1000 bp, Homo Sapiens; identical to SEQ ID NO: 119902

SEQ ID NO: 481101 - DNA, 1000 bp, Homo Sapiens
gaattcttggttctattagcgattctgatataatagaataacagtggagattaagaatgcagaaattgtttaagtttctcagatgatcctgattttcagccaagcctgggaatgactgatgtgtacaaaaatgtaatacaataatttaatttaatgtagtacatcatttatttcctatcatcctattcaaagtggtatgtattgggaaatatctgcccccagggaagagagctgagaggatatctatcaaaatcagaatggcaattatctctggattatgagttatggaaatacttattttacatttgtgtttcttatttctaagttttctggttgagcatatattatttttataataatagatattacttacaaccagtgccagaaaattattcacaaccagttcaagatgttaaagactcatatgcagcctatgcttttagtttatcaaatgtaaagaaaaaaacaacttgagaggctgaggcaggaggattgcttgaggccaggggttcaagaccagcctgggcaatatagcaagaccccatctctaaaaaaaataaaaagaaaacaaaacaaaaattagctgggcactgtggaatgtacccatagtcctagctactcagaagcctgaggcaggaagattgcatgagtccaggagtttgaggttacagtgagctatgatctctccactgcattccagcctgagtgaaagagtaagaccctctctctacgaaaacaatctgtcaattcatattcacatactttttcttttaaaaggcaaggctacatataaagcaacatggatgcaatatttatttttgttttttaaaatgtcacaaattcttttagtaaatatatatcttagagaatataaaacaaattaaatcctaattagcttttacttcttttgctttggcatgaatggaaatataccaatgtttataaaaggaccaatcaatcagtaaccttatacttgatggggtgaaataaacagttctgg

SEQ ID NO: 481102 - DNA, 1000 bp, Homo Sapiens; identical to SEQ ID NO: 308096

SEQ ID NO: 481103 - DNA, 1000 bp, Homo Sapiens
gcaggtcgactctagaggatctgtttctttctccttccagtttttgctgcatttattttgaactgttgtattaggtttaggattatgtctttttcatgaattgacccctttatcactatgaaataatcatttattactggtaatattctctactctgaaatttactttgtctgacatgaatgtagccacagtagcttactttttatttgtattcacatgtgctatcttttgtcattcttttttgggggggggtaccagatttctttatttgaaggaatggtacaaatcaaaagaacttaagtggatgttttggtacaacttatagaaaaggtaaaggaaaccccaacatgcatgcactgccttggtgaccagggaagtcaccccacagctatggggaaattagcctgaggcttagctttcattatcactttctcccagggtgtgcttgtcaaagagatattctgccaagccagattcgggtgctcccatcttgtgcaagttggtcacgttcacccaattctttgatggctttcacctgctcattcaggtaatgtgtctcaatgaagtcacacaaatgggggtcatttttgtcagtggccagtttgtgcagttccagtagtgactgattcacatttttttccaaatgtaatgcacactctatcacattcagcccactatcccagtcatcagtctggtttcttgatatcctgaaggaaaattcagccaccttgttggttctgcagtttcatcagtttctcagcatgctccctctcctcatgagattggtgaagaaagtatttggcaaagttcttcaaagccgcatcatcacggtcaaagtagtaagacatggagaggttaaagtaggaggcgtagagctccaggttgatctggcggttgatggcggcctctgagtcctggtggtagttctggcgcacctgcgagttggatgcagtcatcatggcaatgactaaggagaggctgcggcggcggtggctgcgtg

SEQ ID NO: 481104 - DNA, 1000 bp, Homo Sapiens; identical to SEQ ID NO: 308098

SEQ ID NO: 481105 - DNA, 1000 bp, Homo Sapiens
tcctgcatggagtgttatttttcaaggtttttcacaggggttacagtaggacagtccccaccccaatcaggcaccaggataaaagcagggacttaaacagcaccccggttcttcagcctgagccatcacatgctatcagtctcctaacctccccctgggccttaagacagggcttgggcagagaagataaatggtgggacaaaaaaatgagttacattgccacctgagaaacctcagaggggaggacccagccttagcctccctcctcccaagtgcaaaatgtgtaaacagagtaaacggaacagaaaagtgcagtctaagtggttttctctcctgcccctcccaccgcccctccccccaccccctattatttggggataaagaatataaagacaaccctggcttttctattgccttgttgcttgctgaatataaggaatggggtggggcaggaaggggcttgcccttagccacagctctacggctgtgcctcattcatttccacagctgccagtgtccctagagtttatcaggtgaattggtcaggggatcagtctccctcgagcctgacttacggctgggacagccccatctttctgttgattatgtggcgcatatatatatatatatgtatatatatataatttatataaatatttctctatgtacaaggaatacgagtggctttcatggagggagggaagctgggggccgcaaggcatcaacgctgttggagttgtccaattcagtgctgtcacagtctgagtcctcagaattgggagggccctgtgagaaagagtagaaatggagtgagattccttggggttctttgctggggtcattttaatagccagtggcttactgatttgttttttaagacagagtctcactctcgcccaggctggagtgcagtagcacaatctcggctcactgcaacctctgcctcccaggttcaagcaattcttctgcctcagccttctgagtagctgggactacaggc

SEQ ID NO: 481106 - DNA, 1000 bp, Homo Sapiens; identical to SEQ ID NO: 308100

SEQ ID NO: 481107 - DNA, 842 bp, Homo Sapiens
cctcaccgagtagcagcagcttcacttctttggccgctttttccccgtcctcccgtaagttgcggtcgatcatcttgcttcgctccactgccgccttgtcttcggcgctcaacgtgcagcccatggcggcggcgggagaggggacacgggcccggactcactcacaccacggaaactgcggctcggcaggctgagacaccgtctattgctgggcggtggccctctccgtcagctcccttagcgcccagaagaaccggatatccgacgtttacgacacttccggcgacgccccgcagccttcaccgtttaaaccactctcctcagggagaggagttgagaccgaaagcggaagtcacggggagctggcggctgggttggcggcggatctgcagagtttcgaggttctgtcaagttcgctgcccgccgcccaacttgaagcctcatttacctttcggctacctgatttggataaatggagaaaaaccggggccgcgaactcataatgccctcccgcgttcaagatgccagttttggggcggagatttctaaattaaagcctacatcccgcgcgggaagatctgctggtaatttctcgcctgccagaaaactcctttgatctctggctgtggagactcgggaccccttacccaaggtatgggacactgcctccgttggggttatctcagatcaatggaatgggaacaagctatccggcctgggcgcgttcacgtctcacatctgagatcgtaacaccgactgtgcttaggacctcagcaataactttttgccgtctctggcccactgactcctctcaaaatgtcccctggtccttttgctattca

SEQ ID NO: 481108 - DNA, 365 bp, Homo Sapiens
ggtaccatcatatgttaatgaaaaacctcagtgcaggcaccaaacttaccagcagcacaagtcccactgacatgaagatggcacaaacaaacatcccactcattccaattagaaagagagaacgtcgccctgccttctccacaaggaatacctaggacaattttaaagaaattatctcagttttgtgagtcacaaaatattgactgtttacttaaatcatttttactgccaaagaggtcattttaatttatataacagataagaggcaattccatccttccattttacaggagtgagatcaaggtggggagtgactctagccccaggtggcagagctagtttcagtggacagcgggtaatgatga

SEQ ID NO: 481109 - DNA, 1000 bp, Homo Sapiens
gaattccttaggtattagaataaacataaacttgatcatggatacctcatggcagatcactttaagtgaggtcagagagtattatcacaaaaagataatatatttctaatgttttgttcacacccaccacaaaacagttaagttaaattcaaaataatgtacactcattttcattatcctctatcagttttcacatggctttaaacagtgaatttctaaactacattctcaaatgcaatagactaaaatgcataaagtgctcaacagaaaaagatacaatatgaaaaaactttgcttataatatacagagtggttataaagaacatatggaaattactatccagttaagctttccatccaagaaaacaaccttaaaaactaaggcaagatggactactctttgaaggcaagaatactgctggaataagaggaaaacctttccactttgtgctgcatcattctgcttatagaaacagtctttaagggactggtatttacattatagcaatcacatgtacactcaaaggtaaaagaaaaaaaacctcagaaatttttatagagtctaatatttggcaaataatctgaaccactttaagggctttcaattaccatgtatattactggcaatagtactgactttacccaaactaagagaccacctaatttccaactttatttagagtagctgagcaaggaactgccatgtcaaattacatggcaagtttactaatagtctttggaaaagatgagtgtagaacttaaaaggcactagttctacaagtctctaattaaaaggcaatcttctcgcggggtcagggtggtggtgatgggaaattctataccttgtgttgtttgcctagcctcacagcaaactgacagtggttgcatttgaaaaagttaccagattttttaagaatgaaaattaagcccaaaagttacaaagatttttctgtgtacagaggtctacaatgcattaaagtttctttttaatccttagaaa

SEQ ID NO: 481110 - DNA, 770 bp, Homo Sapiens
attttaaacatagcttgaaataacaaatcatgactatactacatgcaaataatttgtattttgttttatttttatttagaagtagagaatacagtaataggcaggagaacagggagttaggatagccaagggttggggcataagcaaaggaatagcaggtgcagccagtttgcataaacaagagaacagcaggtgcagctggttctaggcaagatcaggcagcatgcaggccacatcctcatgcctgtgataaaaagacagaagtttccacttcagcctctgcttgaccatgagctacgcctccacttcagcctctgattggtcacaggccaatccttcatagggtgtagccaattggaggcttctaaagggtacctaggggtgttgccaagttcttttggctttataaaaaccctaattggggccaggcgcagtggctcacatctgtaatcccagcactttggaggccaaggcaggtggatcacttgaggtcaggagtttgaaaccagcctggccaacacagcgaaaccccatctctgctattaaaaaaatacaaaaattagtcaggaatggtggcccgcacctgtagtcccaactactgtggaggctgaagcacgagaatcacttgaaccagggaggcagaggctgcagtgagcagagattgcgccactttgcactcaagcctgggtgacagagggaaactctgtctaaaaaaaaaaaattaaaaaaagcattaatgattcaaaaaaaatcactgatgttaagaattc

SEQ ID NO: 481111 - DNA, 1000 bp, Homo Sapiens
tacacagccgtcagtcactctggggtcgtaggttagacaggggcttgatacagaaaggctgtgtgtcttacaaaggccaaaaggtcatgctaccaggagatcaacgtcaacagcaaagagtccgtgaagcagtctgtagagagagagataaggggtccagtctgaccattttctttgattttaaaaaccaaccaaccaaccaaaaaaccctagaacattttgactactgctggggttgggcgagatggggcagcagcacgaggggtcaggaaccccattgaagcccatccccgggctcctggggaagcctggcccccccctggagaccctgactcgggtcaggcccacaagtacggccctccccagccacgcctgttcccctcgctccccaccttcccacatgccctcttggagcggggctggtttcaactctgcaggtgaacttgagtcccctcctgtcagctgcttttagaaagcagaccaagtctccctgttctctgattcttgccatcttaacatgaataaagaaaactcaggagacagtggattggtcggagcaatcgattcttctaaattcctgaaattaacaaccaccaccaccccgaaagagaagcatccttaaattgttctgtttttgggagtgcagagtgaggagaggcttagggcttcggccatttctgaaagggtctggaatttgccaagagcaggacggaactgagggcgcagaggctctaagggcgcaacacagagagctggctgggccaaggccagggctgttctgccattcacctgttctcagaaatggggctgagaggaacaccccggggctatcctcaaaaggagggactcccaaaccaagctcccatctggacatgtgtgagtgtgtgtacacacacacacgtgcatgctcacgtgccgtcccaggaaaacctccatgagctatgggatggtggtcagttctgtctgcagctctttctagtacaaactaaaaagatttttt

SEQ ID NO: 481112 - DNA, 1000 bp, Homo Sapiens
cagggctccccctccccctccccaacagcacccaaacccctggcgtcgtgtaggcctcgcggaaaaagagaaagagggggagagcgagagcgagagaagagagagacatgagcgggcaggccgggggaggggcacccgcgcccgcgtcgccacggccccccgccccgtttttgagcccccgcccggccgaatccgcgcccctgggtcccccttccggcctcgccccccacagacagagcccgcgaacgggcggggggctcgggagcgcgcgcccggggcggggggcgggctcggcgcgcgcggcctgcggggcgcccttcgagggcccccgggccggggccggcgccccccgcccgcccttacccagcagcagcaggcggtgcgtggcccggtagacctgcttgtccttctgcagctgcttctcgatctttttgttggcctcacgctgcgccttctcctcgttgcgctggtcctcggtcttactgttcccgaggcagcccatggcggcggcggcggcggcggggcgcggccgggctgcggcggcggcgggcgcgggcggcctcacgcgggccgggagggccggggcagcgccgggcgggcgggccgggcgcgggctcggctcctcggcaaggagcgcgcggggcggactgcgggccgcgggccgcggggcgcgcggacgggcgggaaggggagggtgtcggtcggaccgaggggcgcgcgcagctccccgcccctcgagccgaggccgagggggctgatggccgccgccgggccgaggcggaccagagcaggagctgcgggagctgctgccgccgctgccgccgccgccgctcttattgcctcggccgggcccccgccgccgccccgagccaaaagcgccgcggcgggcggggggaggcggggggaggaggaggcggcggcggcgaggggggtggaaggaggaggaggaggaggagggccgaggagcggccgcggcggcggcggcggctgggagggcggg

SEQ ID NO: 481113 - DNA, 1000 bp, Homo Sapiens
gatcaacaaaattgatagactgctagcaagactgatgaagaagaaaagagagaagaataaaatagacacaataaaaaatgataaaggggatatcaccactgatcccacagaaatacaaactaccatcagagaatactataaacacctctatgcaaataaactagaaaatctagaagaaatggataaattcctttgcacatacaccctcccaagactaaaccaggaagaagttgaatctctgaatagatcagtagcaggctctgaaattgaggcaataatcaatggcttaccaaccaaaaaaattccaggaccagatggattcacagccgaattctaccagaggtaaaaggaggagctggtaccattccttctgaaactattccaatcaatagaaaaagagagaatctgccctaattcattttatgaggccagcatcatcctgataccaaagcctggcagagacacaaccaaaaaagagaattttaaaccaatatccttgatgaacatcgatgcaaaaatcctcaataaaatactggcaaaccgaatccagtagcacatcaaaaagcttatccaccatgatcaagtgggcttcatccctgggatgcaaggctggttcaacatacacaaatcaataaatataatccagcatataaacagaaccaatgacaaaaaccatatgattatctcaatagatgcagaaaaggcctttgacaaaatttaacaacacttcatgctaagaactctcaataaattaggtactgatgggacgtatctcaaaataataagagctatctatgacaaacccacagccaatatcatactgaatgggcaaaaactggaagcattccctttgaaaactggcacaagacagggatgccccctctcaccactcctatttaacgtagtgttggaagttctggccagggcaatcaggcaggagaaggaaataaagggtattcaattaagaaaagagggagtcaaattgtccctgtttgcagat

SEQ ID NO: 481114 - DNA, 1000 bp, Homo Sapiens; identical to SEQ ID NO: 119903

SEQ ID NO: 481115 - DNA, 1000 bp, Homo Sapiens
  misc_feature (461)..(464): n is a, c, g, or t
  misc_feature (480)..(480): n is a, c, g, or t
  misc_feature (485)..(485): n is a, c, g, or t
  misc_feature (508)..(508): n is a, c, g, or t
  misc_feature (519)..(519): n is a, c, g, or t
  misc_feature (804)..(804): n is a, c, g, or t
aagaaagtgtacaaactttattgaaacgcacacgcgcacacacacaaacacccctgtggatagggaaaagcacctggccacagggtccactgaaacggggaggggatggcagcttgtaatgtggcttttgccacaacccccttctgacagggaagggccttagattgaggccccacctcccatggtgatggggagctcagaatggggtccagggagaatttggttagggggaggtgctagggaggcctgagcagagggcaccctccgagtggggtcccgagggctgcagagtcttcagtactgtccctcacaagcagctgtctcaaggctgggtccctcaaaggggcgtcccagcgcggggcctccctgcgcaaacacttggtacccctggctgcgcagcggaagccagcaggacagcagtggcgccgatcagcacaacagacgccctggatggtcagagnnnngcgagagggttggacnaggtnggacctggtcctggccataccanccccaggatgngttggcactgacctgggcgtagggacagcaggcccagccctgtcggttgtctcggcagcaggtctggttatcatggcagaagtgtccttccccacactccacgtccttcacacccacgtgagggctacgggccaggaaggtggcaggctgggcagagaccacttccttctcgcaggatcgagccttcacgttgcaggtgtagccagccgggcagcagtgctggcgatcctcgcagcacacagcctggcgggaagggagcacagaatggcattatgttcctgtccntcactgggcttagctccctcactgggcttagctcccctatccaggggcaggcagggaggcactcacatggggcaactggcagcaggcccagctcccacccaggctcgggcagcaggtctgccccaccgggcagctggtgtgctggtcacagccgatgtctctggggtgggataaggaagcccggcgggcaggcatc

SEQ ID NO: 481116 - DNA, 1000 bp, Homo Sapiens; identical to SEQ ID NO: 308105

SEQ ID NO: 481117 - DNA, 1000 bp, Homo Sapiens; identical to SEQ ID NO: 308106

SEQ ID NO: 481118 - DNA, 1000 bp, Homo Sapiens
gggctgccctaacgaaagcaaacttttgatttcaccttttccgtcccatttggataacattaccacttggaagtaccgtgtcttgttagtccttgccgtgggggtggggggaatgtttgctatgtgcaaattttttaaaaaaaaacatgacaaactgtcaaaatgacctgctcaacccaaccacaaggtaacaattttacataatgctgtgagcaagctgttaattctgctaactaccataactcggtactttcaaataagaaaccctgcttctcttcgataaaatggagatagtatatccccaatgatgttactgagtacttaacaacttcagacttcaaagcagggcctggcacgtagcactattatctttaaagtttaaattcggagttcattctgtggatatacaggacattcctacctattctctccctccccaagtccaccatgctaacagcatactagtgcagtgctgtcacacagcaagcgaagccaatgtacaaactgaaatggtcacacttagcctaagaaactgacaatcccactccagctcctgccaactttttaaattaaaactttagtagctcatataacattaaaaaaatatacttgggctatctcactttgttgatctacagatttgacagttcagtcacaaagaaatgtgcttagttattgctgctagatgagatactcaaaacaagttcctattacaaccaagcaaatttaatacacaactagtttgggatatgacctttattgaacttatccaccagagtggaaataatgtctgtacaaaaccaaatgtttgttactataacttctgcatcacaattaaaatccaaacagttttttaaaaacagtcaactcaatcaaaacccactacttcagaatcaatagcttctttgaagccacagtaacacttaaatatggttaagactcgaatgcagaaatttggttggttggaaagctaattaaacttccaacttgctcaaataga

SEQ ID NO: 481119 - DNA, 1000 bp, Homo Sapiens; identical to SEQ ID NO: 308107

SEQ ID NO: 481120 - DNA, 420 bp, Homo Sapiens
accaactcttgacttcaataaaaactgccaataaaaagagctaattaaaagaactctgatgacattcatctgaaattttagatttctttatgttttaacaaattaacaacaatgataagaggacattagcagcttttcttgggtctctttgttaacaataactcgatcctgcagccataacaggggatgtggccaagttttagctggcagaccagtaagccaatattttactcaatggatgacatttctgaaagcagaggcagagacagacccaaagtcacacatgtagtccaacaaacaagtttctgccatttttaattgtatttagagcaacaaaagattccaagattacaaaaagagaacagaacactagcgcttggagctggtcctgctgcccagtggaggccaagtcccaccgtg

SEQ ID NO: 481121 - DNA, 1000 bp, Homo Sapiens; identical to SEQ ID NO: 308108

SEQ ID NO: 481122 - DNA, 1000 bp, Homo Sapiens
gatacatgattttatttacacaactgattttcttagtcaccttgattacaaaaaaaggaacatgatctggtttaatgacctttcataaatagattttacaaattttaataactgacagattactacttaatactcagtaatacttaatacttagtaacttctgcatttacgtgtatgaaaattccagtagagctaataaggatggggacctttataactcaggaatagacaattaggttattggtcaaggataaattggtcaaggataaattccccatcactgggtcagctgtttagacctggagttcttaccctcctgagaacaaacctgttgcagcaattcacacttactgtgtaggcatttttaataatttgagaaagtttattcttatttctgcatttagtaagactatcattaagcatatctgaaaaccaaaagtttaccatgtctatagatatttgtaaaagaacttatcacagtgtatctgaaaaacagcccaaattagagccaggttacgtgtccaataagcatttttcaaactctcctctgggtgtgtgcgcacacaccataaggctctattacacacgcatccaagccttggcctcacaaaatgccacaattttgctgtttttgtgaaatgcctatataaaatacagtatttgaatgagactattttaagtcctatcagtgctttaagtctgaagagcaggcagtgttttggtaatccgactcttttctgcgaagttacagtgctgacaacacagccagaagagctgctgagacttcccaaaagctgcccccacaagactggaggagtgttgtgcatctgtgaccacaaacaagcaatgaagaatgacaagaagcttatgagtcatggtcagaatctaagaaacagaaacatcttgtagcagcattaaattacaaacacaggaagagctgatccatgggcctttcacacaggctctataagagccaaacaccatctttttcacatcagaa

SEQ ID NO: 481123 - DNA, 1000 bp, Homo Sapiens
ggcattctctaggttacctattcactctgatgatagtttcttttgttgtgcagaagctctttagtttaattagatcccatttgtcaattttggcttttgttgcaattgcttttggcatttttttacatgaagtctttgccaacggctgtcctgaatggtatcacctaagttttcttctcaggttttcatggtttggggtattacatttaagtttttaatctgtcttgagttaatttttgtataaggtgtaaggaaggggtccagtttcggttttctgcatatggctacccagttttctcagcatcatttattcaataggagatcctttcttgattacttgttttgtcaggtttgttgaatatcagatggcgagcagagacccaaatcatgaatgaactcccattcacaattgctacaaagagaataaaatacctagaaatacagctaacaaaggatgtgaaggacctcttcaaggagaactacaaaccactgctcaaggaaataagaaaggacacaaacaaatggaaaaacattccattctcatggataagaaaaatcattatcatgaaaatggccatactgatcaaagtaatttatagattcaatgctattcccatcaaatgaccattgacattcttcacagaattagaaataactactttaaatttcatatggatccaaagaaaagctcatatacccaagacaattgtaagcaaaagaacaaagctgaaggcatcacactacctgacttcaaactatactacaaagctacagttaccaaaacagcatggtaccagtaccaaaacaacatacagaccaatggcacagaacagagacctcagaaataacaccacatatctacagcttcagaagcatttatacaaatgaatacacttcaaggagctaacccatgctacatttcttaaactggaatggttgttagcttatggctttttttttaaactgtcagtgttgacacttctagaaagacaagtaacta

SEQ ID NO: 481124 - DNA, 1000 bp, Homo Sapiens; identical to SEQ ID NO: 308110

SEQ ID NO: 481125 - DNA, 1000 bp, Homo Sapiens; identical to SEQ ID NO: 308111

SEQ ID NO: 481126 - DNA, 1000 bp, Homo Sapiens
gaattctacaatatttaaaaggcacatcaacgcccgcccccatcaaaaatcatccatactagatctcatatttctgctggtagctgggaatgagaaagagatagcagttagatactcaaataatgccctattcatgtttcccttactgatgtgtaagcttctcacaggctgggagcttctcaaacgtgtctctgcatcctcctctggtacctaaaaaattgactcagacatgggagggtccaataaatatcaataaatcaacaaaatccagccctgtaacaacagaggggctgtctgcaaacattccactcccaggtgcaagcagcatgttccaaggttctaaatgttcccagggaacgtcaagtggcgcctaggttcagctgcagctgagtcagatccctcatcagctacctattgtcctgcaggcacctcctcttctcaggccctacgtggaactcccctaatcaaacttaacaagagcaaagagataatggaccacctccctagcagctggaagggggcttgcttccaatgggccacacgggcatggtgctctgaagtgcagccaagagaaaagggaggcctctacagccttagtaataggtctatccccagaaatctggaaaaggcatgttaaagactaggatctttttcctttctcaaagtgagagtaccctggcaaaagtcaaggagataataagaggaggctacagtaaaagatcagattcggtgaggcgcggtggctcacgcctgtaatcccagcactttggcaggccaaggcgggcagatcacaaggtcaggagttcaacaccagcctgaccaacatggtgaaaccccgtctctactaaaaatacaaaaattagctgggcgtggtggcgggcgcctgtaatcccagctactcgggaggctgaggcacaagaatcgcttgaaccgggaggcagaggttgcagtgagctaagatcatgccactgcgctccagcctgggcaacaaggcaagact

SEQ ID NO: 481127 - DNA, 1000 bp, Homo Sapiens
ttttttttttttttttttagcttttctggcttgtttaatgctgcgggatcctcaatgatcataattccatgaggatggcacatatgatcctttctactgggaacatcactaattattatcttgctactggcagaataagaaaaatcaggaaaatgactacatttgtgatcttcttctaactcttcctttctaatttctttgggatcttccatttttatagccattatgtcatctatttgcaatgcctcaaaatttctcaattccttagaatctcttaaattttccttagccgatttttcaaattctgcttccttctgtaacctagtttcatctgttttctccattttaatttctttttcttcctttcccttctctaattctttaattcttccaccatcggattcttttgcttttattagctttgattcttccattttcatcccttctgatgccaggcacatctctgccagttgaaagagtgcagactttccacagcgttttacaggctcagcaccacccaactgcgaagtgtttgaagaaatctctgcaaactgaaacaaggcagatgtttgacactgctttgtagaagcatcagagtgggacgtacttgaagatatctcggcaaactgaaacaatggtgacttctgacgtaattcaggagattctgaaacatcaggcctgcatgtgccagaggatacctctggtgtgccaagagcatgttctccagctaacagcagcatactcaggcctcccatttgagtaggatcagccattccaaagttaagctgaggcatttcttcagtctttgctttcttggggcttggcaagtctcttgaagagtcagatgggaaggcccaaagtttctttcgtggattgacagtgggtgttggggatttcacaggcttgtttgtggtaggacaccatttgtagccaggatttgctttcataaatgcatccttatactccttggccatgtctgtgtatttctgcttttcctttg

SEQ ID NO: 481128 - DNA, 1000 bp, Homo Sapiens
atctctggtgtgtttttgccttgcgctcctggcgtggtcctcagacaggcctaaaagccgtccagccagcaggcctgggggaatgaagcctgttttgtagaagatacagaagccaggataggggaggtgacatgcccaaggtcacacgtgactggacggcaggggcaggtgagcacctgctgagctgacaacaagcagtgcccagcagctgcctcctcaccctagctgagctgaccacaagattccagacctcagctggagctgcagcctcatactggctgagtggctccaagacacagaaggaagcagggtggcaggctgacctcagccagctgcctgccccctctcctctgaggctggcctgggaccgatggggctcttccctccaggaggggtttccgggcctcctcttttcccctacctccctgtggagaactgtccacccctccagatatgctccagtgatgtcggaggggatgcctcaatctggcgagacgcagcggcaacaaaatctgctcagagacaaacggacatgttgctgatatgaatctcacttggtgagtggcaacaacagagtcctgcatttgggtctgtgcagtcgtgcacaccagagaccgctgacccccgcccgcagcacagggaactgcatatatacacagcaggtacaaatatgggcacacgacaaaacgcccatacaggataaagatgcaggaagaacagggcactccaacaggtccgcatgcacaaacgcatgtgctctatgacccgcacacacagcacacatgtacaaacatccacagacacaagtacacacacatacacacttacatacataagcaagatcaacacgggcaactcctaagacacaaacacagacccactcaatgaatacaaaggaaaatagacccagaactcacacacagagacaaatgaacacacatatgcaaatgggttcctgaaggcatcaccccacccatacaacctacatggaaactcacta

SEQ ID NO: 481129 - DNA, 1000 bp, Homo Sapiens
tcgtcgaagccccgctggtccatcaccaggggcggcgacacgtggactgctgggattacaggcgcccaccaccacgcccggctaattttttgtatttttagtagagacggggttctgccatgttgcccaggctggtcttgaactcctgacttcatccatctttctcggcctcccaaagtgctgggattacaggcgatgagcaccatgcctggccatcagtttcatagtacttttcaaatatccctttttgatttcttcttgatgcataaattttttagaagggcatattaatttccaaatatttgtgtattttccagagatacattattggtttctaattcaattccatcatggtcatggagcatactttatatgatctgaatcctttcaatgtgttgagacttgcggtgacccaaaatattgtctatcttggtaaatgttccatgtgcacttgaaaagagtatgttttctgacgttcttagttggaacattccacaaatgtaaatgaggtcaatttggttgataatgttgttcaagtcatatatctttaccaattttctgtgtacttgtactaccctgattttcatagagggatactgaaatcttcaactacagtcattaatttgtctactttctcccacggttctttcatttatgcttcatgtattttgatgctctgttaagtacataagtgtttaggattattatgtcttcctgatgagttgacctctttgatcaatgtaaaatgacccttttttcctagcagtaatcattgctctgaaatctacatcatcagttcttataatgtcactctagttttcttttgatttttgttagcgtacatctttttcactcttttaatattcttagctaaaaaaaggaagaagcagagcagttgtatagtatgctactatttgtgttacaaggcagaaatatgtatgtacatatctacttgcatatacataaaatagctcagggagtgaggaaactaaaattatct

SEQ ID NO: 481130 - DNA, 1000 bp, Homo Sapiens
gaattccatttggcattgtgcatccatccactggacgggctttgtggggagttcgtcatgctggtgtcaacagcaagtgaggtgggttccgttcttcccagatgccaatgattgcggcggaaaggcaacggtataaatacccttgatagccttttctccttaagtgggtggagatattggtgggatgttctaggctagtcttcggtgtaataaatttgaagcagttaagtgaaaagtagaaggaactgtttccgcccggtttcgaaccggggacctttcgcgtgtgaggcgaacgtgataaccactacactacggaaaccggcttgatgcttttctgccatcataattagtcacgacacacggcggtattttatttctcataagagttctgagcttcttccgtgggtccctttgagcttggtaatgggtatgacgcacaagaatacagagtccatgcaaccatttaaaaggggagggttgcagagtcagagagtagctcagagacacagcacagctgagtgaatgtggacgtttcacttgaacacaaacacacagaaaccaattagttggctgattttctcgaatacacacacatagaaaccaattagtcggctgattttctcgaatacacacatagaaaccaattagttggctgattttcttgaatacacacacagaaaccaattagttggctgattttgttgaatacaggtgaatgtagggtttatacagaaaaagaggagaaaggagagaagcaccagagctcctcttgaaacagtgagtctttttttctcctgtaggtaagttgcttggctagagtttgccacaagcatatgtctgcactgccctgaatgggctggctgagctcactgggaaactatttaattatgtatagtttcccccaaaaaacttaagtctgcaatgcttgcaaagtgcaggttgtgtctgcaccgttttttatcattataattcttcagaaattaacataacctttcaattt

SEQ ID NO: 481131 - DNA, 1000 bp, Homo Sapiens
tcattacctcttgcagccgctccctctctgtctgaaggatggcttagcaataaaagcagaggagcacagtccaccaaagcaaccaaagatctggtaactatttaccgacctatcaagaaaatgttaatggctttcaaatgcaaatgaatggccagcttttatttccaggatcagaatttttagttaattagtaatcgtggtcttgctctaagaaggacatccttaagacttttggaaggaaaagccagctcccatgacccactccatcccctccaggcactgaatgtttaatcggtggtgaggacaccctgtatgtctggtaagagaacacagacacaatttgtagatgataaagagcaaaaaataaatgaccccagtattccaaaagagccctggtctcttgcactgactccgaatctctcaggaactcactgacgtttagtagcacaatctgatgattgtgatggaaggaagttgttttaaaaatgttttaaaaatagttttcttctttcttctttaaggtgtccttaagcttgtttgcagtatggaaatcctttaacagtctggtgactcttgaactgcctttgcagaactataaataagagaaatctaacaagactgactccatcttgcttctaacctcccaggctaaattatgttttctaggggattttttttttttttggttggctttttgcttattctagtacaaaggccaagaaacctatgagagggatttagtttatagttaaacttggagtcaagggaaaatgatccccctccttgcctggagcttaaaggcgcattcataaggcaaggttggaattatggtaggggcttagactttgctaaagaataggcataaacaatgtcctgccatggcttagtttgtttttctataagttgcttactgccccagtcacacaaccagtgtcacaaaattcataacttccccaactaccaaagataacatcactgtattggtctgttttcacacttc

SEQ ID NO: 481132 - DNA, 1000 bp, Homo Sapiens
ttgctaaaagggaaagcagggaacattttaataaaataattattatataataaaataaaataattagtgatacaaagcccagagatggtcaataacaaagggaaagatatttttttaatggtaaaaactttatttactatttataaatacattgcaagacaaacttctcaaaaatacttttccccccaaaaagttaaaaaaataaagaaaagctaataggtaggcagaatgtcttgagacccctctgttttcaaggagagctctatgcagcgtgtgtccacaccgaggtctgcagcagggcagagtctccctgagcctgactttgccagaccttcttgggtttggcctccgggagagcagcccagtctctgggcgtgagctcctttcctcagtcatggccacagttgtatcatatagcatctctaacatttcatctaggattatctagtatagatcttactatatttggggctatgttgtatacaatgttaacaagaacatatcttctctgcatatatgtgtgaattataaagaaaagcatgagaatgactctaagttcaacaaacatgggtgaatctctatgtgctcccagtgtcctggatgggctccccagcaagccattcctccttcctgttctgatattactattcttttttacattgtgctaaggaggacaaaagatgagagatgaaaataaagctttgcctttaaagagcttatcctcagaaataagcttcgtcttgagttgttgaactacaaaacactattttctgcagtcatccgaagaattgtgccattacttgtgatgcctctgaatgtggaggctgactctcccgtctctctgtccctcctaccccacggggccgcagcaaaagccatcctgggccttcgactgggccatgtcttcaggaagattcctgaagaggagggcccgaaatacctgcctttataggttcccagagtgccctagaacattcttagatacatattttttaaacaa

SEQ ID NO: 481133 - DNA, 1000 bp, Homo Sapiens; identical to SEQ ID NO: 308114

SEQ ID NO: 481134 - DNA, 1000 bp, Homo Sapiens
acaagtaatacgtgagcaatgaatcttgactgaaatatgggaagataagaggaaattctttacagagatgttctggggcaagtaagaggaggaagctatttcttggagcaggaacacttgatggggtatagtattatgggctacaatgtgcaggcaaaggaaggaggaagaaagacaacataacattgtcttgagtaatcattatgcctttaattgagcacattattttctcagtaattgttggagtttaatcgtagctattacccttgaggctatgtcttagggttgaggtcttccctagaacctctgcagtgccagtattatctttgtatcaagagttcttgataatttctgctctttggaggtagaagtgtcacccattaatgccttgtacggttcccttgcttttctcttttcccatgtactctttgtaaaataaacaagtgctccctatctgtagagcctcaggaaccttcttacacacctggacaaaaaaatgaaataagtgaaattaatcaggaagttgagctgaacattctttattaggcagaagccatacccttgaagtaggcattgtgttcccaagttcagaaaatagaatctagggaaatagggtcttcttatggttatcaggaaacagtccaggatctcaatggtacttgtgagccagggcattagccacaccagccaccaccttctgataggcagcctgcatttgtggggtgaattccttgccaaagttgcgggccagcacacacaccagcacattgcccaagagctgcggagaagaggtaggcagatacatgcatatggttaacagagaaataaagactggcttctgagaaactgagccaacacccatttttttctgcccaaatcttagacaaaactgatccccaggttattcccatcagcataaataagtacatatatgaatgcatacatataacatatatctatacacacacatcctctatgtacttaactagcatgtagtcta

SEQ ID NO: 481135 - DNA, 1000 bp, Homo Sapiens; identical to SEQ ID NO: 119904

SEQ ID NO: 481136 - DNA, 1000 bp, Homo Sapiens; identical to SEQ ID NO: 308117

SEQ ID NO: 481137 - DNA, 1000 bp, Homo Sapiens
ttcaatatcctcccctcttctcatttgtctttactgccttttatgtatgtgttaaatgttcaataaattctcttttttaaactgaattgaagccgtggagcagtgttttgttgaacaataaatatgatataggacactcttcctccctttcatttatgatcctgttcatgaaaaagagaaattctttcattgtgctagaagcttaaaataatgaaaatgccactttctacattaaacagaaactgaagggaatcaaggtgaattgcaagagacatagaaaacaagtgggaaagaaatctagtataatttgccctttgtgtacctttattacttagcgtttgagtaaatgattcccccaaatatcttcccatcttaattcatgtctctaaagtagacatttatgtctcaccttgtcaagaagggcaaactctaacataaacatttcccaaaaatgcttcctgctaaaacataagctcagtgtggctagaaatgcagctcacttcataaagattaattggtagctaattttgcatgctgttctctgaacttcagtgaaacctgtccatcaggcatacagggaatgacggaaaaggtgacaacagaagatgaatgctatgtcactaatcttcaaagatgacaatgtgcaaatcgggacagccatagaagccacaaccgaaggcaagaaaagatgacttgacgccctgcgaaggttatgttcaggtggtttttagaggaacgtaatccagcttagaggaatgtaatctttctaaccattttgcagcgaacgaacagaagttcgtgtttgctctccagcgggattcagatgcacacgcccagtatgggccgcgcaaggtggagtgagcagctgcgggtcgctccccactcccacctggctctaggagggccctgcggagttggccagggaactgggcgtgggcgatactaaaaaaactggtgaggtcccctctccgcccaaaggggcagccagcgatgtcagcct

SEQ ID NO: 481138 - DNA, 1000 bp, Homo Sapiens
tgtaatgtaaatagtaagttattgttatctgtgtttctttgtaaaaagttaacaatacaagggcttaacagatccaggcctcagggctacacatgcaaaaaaaaattgtcagatagttaaaaatcaccaaaacgtgctatttttaaatgtgtatatgttgttggttttttaaagtacaggagtagtagaagtattaaatatgaaatattagcaggaatagtatttcagaactctgtaaaactgtgtggggagttcatggtgctagtgttctggaagattcatacatttctgatgaacattttggtttaattcctttgccattgtaatagtccacaacttggtttgggacttcagccagcacgctctttgccagggcagctggagatgcgtgtttgaagttcctgaagggcacgaactggacgatgtctcgaagaacaggctctcccttgggtgacctcagaatcccatcatcaccgtccagcatctgcatgtcactgaagtcagcgttccctactcccacgatgatgactgacatggggaggtgggaggcatggacaatggcctcccgggtgtcggccatgtctgtgataacaccatctgtcaggatcagcaggatgaagtattgcgatgcctccttggtgttagtttcctctgacgctgacttggcaaccttctggatgatgggggcaatgttggtgggaccatagagttggagcttaggaagacagctctgataggcttccacaactccttgaattcctgcacattctgggttgtcttcattaaagttgattgcaaagtcatgagagaccgtgtactctggaggtatcctggcgccaaacccaaaggcagggaacattttgtcactgtcatagtcttggcaaatctcccccacagctaccaaagctttcagatactcattgggttggtaagggtggatgtagtgcaaggaacagctgttcctggggtccccgtttgaggcagtgaaatctatagctac

SEQ ID NO: 481139 - DNA, 1000 bp, Homo Sapiens
tgcatttattatacttgactgtattcactctcttaaattccagattcaagtccagatgatagtgaggatgtttactcaaatcaaatacaattttctgagtttctagtatatgatagtatacacctgccagtgggaaaggttgaggaagattttgtttgagaaacaaactaataggggagaaaaattacccatcagagtggtaagtaacctcttcacaaattgtggtttccaaaaccaatgttgtgcagtggagaaagtaatgtttttattataaggctaacgatggaaagagttaacgggaaaggagaatttaaaacaaatggtaggaatccacaagattttcatgtcttctctattctgccctgaaagcacagtcatttcttacctggcaaagtccacacgattatgtaaaacacagtttgtctggcactccaaaatctaatgttcagagacctcgcgaggcgtacatacccaaggaggtaacaaagtgttcatgcgcattgagggtcttcatgcatcgcttgttcttgtaatcccatacgcgtagggtcttgtcatcagcacaactcaaaataaacttccccccagaatggaacagaactccacgtacccagttatcatgacccaccttaaaaacaaaaaatttatttgactcattaaaaggcaaaatgtttaaatagcatctatttcataatacaataaaactatacataccaaaaacatcaaaaaaccaaaaaaaaataaaattctaggggattctaaattaaaggaaactgaaaactcataaaacatgaggagtgaatataacgtacaatccctgactgggtcctgaatgagggttaaaaaaaattcccgcagggcattatggaaataacaaaaacaaatctcaatatgtagtctatcaatggtaaatttcttgattgtgaataattttattttggttatttatatactatccttgttcttaggtggttcatgctaaaatacttgggggtaaagt

SEQ ID NO: 481140 - DNA, 1000 bp, Homo Sapiens
ttcctgcatcgtgtttttctttctttgtaaagatgttaggaaatccaccgggcattcattcctcgctgatgctctatgaaaatgtactgcagtgagtctcaacctcagctgcacagtagaaatatgtggagcttcaaaaaaatcctggccgggcatggtggctcacgcctgtcatcccagcactttgggaggccgaggtgggcggatcatgaggtcaggagatcgagaccatcctggttaacatggtgaaaccctgtctctactgaaaatacaaaaatttagtccggtgtgctgccgtacacctgtagtcccagctactcgggtggctgaggcaggagaatcgcttgaacccgggaggtggaggttgcagtgagctgagattgcgccactgcactccagcctgggcgactccgtctgagactctgtctcaaaaaaaagagtcaaggtagtctctaaagactgacccgcagtttcatgtggataacgtgcatctcactggagtctctacagcaagaggatgtctccaatgtgaggctgtctcgatgaccaaccttccaaatgaggtctccactgtgtgtgctcaggccacggggaagctgcagaggggatgccacatggatgagaatgtggatgcggtaatctctaagaggtccttaaagttttttttttttgttttttgtttttttgtttttttttgagatggagtcttgctctatcaccaggctggagtgcagtggcatgattttgatgatcttggctcactgcaacctccacctcccaggttcaagtgattctcctgcctcagcctcccgagcagctgggactacaggtgcctgccaccacgcccggctaatttttgtatttttagtagagacagggtttcaccatgttgaccaggttggtctcgaacaactgacctcatgatccgcccacctcggcctcccaaagtgctgggattacaggcgtgagccaccgcatccatccaggtccttaaaattct

SEQ ID NO: 481141 - DNA, 1000 bp, Homo Sapiens
ctgttagcactaatattcatttaggtgacataactggggtgtaaactattggctctgataacagtggatacttcatattgttgctcaattctttattttcccctactgatataaaggttcatggggatcgtttcacaatttctaagatatttctcccaaaagctcagtgctttggaaatctttattctcatccaaaaatggaagtgattttatctaaaagtctcttggaagtagtgttgaaattcttatttttgggtagtagaagcagtagttacgagggtagtgttgtcttttgtgggtggtggcacctgttgcagttgtctgtatttagggtgcaagagtagggagggcaggatcagttggagaatttacagggaaaaatggaggtccaggtggatagggtcttggttgggaaggtggctgtggataacctgggccataaggaggaggaagagagtgtgattgaattctccctggaccatagggtggaggaggggatggtgggattctccctggaccatagggtggagaaaggggtggtggaaatctccctggaccatagggtggaggatggggtggtggaacaaatcctgttccaaaaggaaaacgtggtggaggaggaggagccagtggtccaggtggatatggtcccctggggcctctttgactctcaccaggctgtggaaacaaagaagtaaataattttaaatcagatatttcacagttaaatataagggtgaatggtttctatggtaagcagaactctgagatggcctcaagatttctactccctgctggcacatgctggcctgaccttatcaggtgagcccttttaaaacaggttctacaatgtgagaaggaatcagagagatttgaagctgcagcaaatgctttcctctgggctttgaatcaagatgccgtgttgtggcgagggccatgtggaagtacatggtagactggctataggagctgagagtggcccctggctcataggcagcaa

SEQ ID NO: 481142 - DNA, 1000 bp, Homo Sapiens
gcgaggtgagagttgtatttttcttacataaaagatctgttttacaaggttattttatctggttaccagtctaatgcataaaagacagtggtatcctgtctcatgtacaaagagcaatgctgcctgggacgcctcccgcatgtgcgcggcaccactctgatgatgctcttccatctctccactcggtcccaatattagagtttcttcaggctgcttcatttttccacgatgcgcctctcagcgaggctgtattttgtaggaaagttccagtgaacgatgtaacaggtggagaatcccagatccgaaaacagagattggaaacacgcaaagggacccgtgtgttgaaacacatttctaatcagataatcgggtgcatctgttctgttaaatgtccactacacttataaacaaattaaccaaattcagaaataaccatacaattgtaaaatctgtaaggaataaggaaggaattatctgtgaatcttgaccattttcctgaaaatctgctgcagatttaagtgttatgaaacaacagaatcctaaatttccagtcactactacaatttgaagtacacatgttacgctgtaaatctgataccccaagacataagaaaaagtcacacttagggagaaaatcttcataattgttagaaatgttagaagaaatatgttcatttaaaaaacaggacattagtactcaacttatgaaataaacccactaagccagcagggagcattgcctaggaggactgtggctcagcggcccttagtgccttggactctatttctatcacccgtgcttctggggcagccctttgcagagagtttccgtccatttcattaggaagctcttgccatgtggctcagttctatgcgtggaaaagcaatgagcgaccttcaagatctgatgctccattccaaggcgacagagaatcaaccacagatgggcgcgagaacagagtcagatcaccggccaaggtaaaatgaagacgatcttctg

SEQ ID NO: 481143 - DNA, 1000 bp, Homo Sapiens
ttttttactgttaagaaacattttctcaaataagtacgtatttcattccttactgaaatggttttttcttattgatccattgaaaccatattggctatgttcaacataactagagatatctttggtgttttcctcccttagcttcatatcttgtagaacatctcgtacaaaaaaagtagatttacagaaaaacatacatataaatcacgtattaatccccaaatgtagtaaataacatagcaaaaactttatcaaatccatttcatgcacaagctggacagatctgttatatacaatctctatatgcatctgcagtgttttataaattggtgctttgacattaaaaaggaggtttacaaaaaggcccctcttgtactatcgatgactgaattatctcactatcattgcttctcaaatttccttgaatttatactcatcattgccatatcaccattctaacaaaggcggttattttaaggaaaaagttgcagcgtgattatgatataagtaacattcaaaatttcacgttatcaagagttgagcaaagtactaatttcccctttataaacacacgtttaaaacaagagcttcatgcacatccaaatagaaattcaaagtcaaactgtgtaatgtgtttttattgacagaaggcatcacacacattcccaagcagcatggttcccgtgagaaactgaaaactaatttcttgaatctacaatgcgacttccatcttccaggtgtaaccagagtttttcctggagcgattccagcttgtttccttttggtgccttccttaagaaattttgcagctgtttctggtgcagtttttgggtgggctctggggtgggcagacgatctccactttgcagaggctgctcttgtgagtggagctggtggtgagggagtaggagaggcctcgcatcatcctggcattcaggcccttagccatggagaaggacttgaggtggcttcttaaggtactggggagcgggagcttgtc

SEQ ID NO: 481144 - DNA, 1000 bp, Homo Sapiens; identical to SEQ ID NO: 308120

SEQ ID NO: 481145 - DNA, 1000 bp, Homo Sapiens
cgtctcaacctgcatgcacatgcacacacacacatacatgcacacacatgcatgtacatgtgcatgtgcacatgtatacacatgcatacatatacacacatgtacacacacacgttgctcacactgcactttcactgacctttcctaaactacggcacaaaccaattggtcatatcccaggacccattggatgaaaatagtcctctcctctaaaaataacaacagctggccggcatgggtgtcgcctggtgctagctgctgtgctaacccctggccatgaatcatcctgtgttgctttcagtgctgggtgtgttattatccccatccaacagatgaagaaactgaggcttggagaggttaaggtcacaggaaaggtccggcagcgtgcggcgatcggcaggatgtgcgggcagcagcgtcaggaaccactgcaacacgaggtaactctttttccagatcccttctttctgatccactctggcaagactgtctctagcccaccgcacccccaattggatgtgcgtgagctcctcaaagccttggtggtcccgacactcaccctgcctggacaccgggagcctctgggtgagctgggtggggcccaggaggaagcagagtccggtgaggtacatgttcctcccgcactcgtggtgcacggtggggccgcaggcctggggacacagcgggctgctgggggcactccctggcatgtacctcccaccctcagatgccggaacctccaccctacaggagagtcccagcccccggcggccccggctcctccctccctccctcagaagcctcctgtgacccagggccactcaccagcagctgggaagggctggtggtagacgccagggacaggcccagggacatgttcacggcctccgggggcactgtgggacagatatgtgcatggtcactctcgggccctacagagaaggctgtggaagagctgggcaggggtcacctccacctgggagacaaggaggtctgacgg

SEQ ID NO: 481146 - DNA, 1000 bp, Homo Sapiens; identical to SEQ ID NO: 308123

SEQ ID NO: 481147 - DNA, 1000 bp, Homo Sapiens
agatctgtcccctaatggcttccaccctcttcttcttgatgtggccgaagtccaaggtggtgcaagtggacagagagaggctgaccgtggcaaagttcagcagggccaggaccaccagagccctttgcaagtgcatcttcatgtgtgagctgggaagagaggccagggggacggcaaggcctggagaggaagagaccccagcagacgtgcagaaggagggaggaaaaccaggcggcctccccagatcccaaagactgaggcttggcaagaaggtgcatgaactcactgcactgcgagagcttcaggacttccaggaagcgctggcaaccctgaggacgaagaagcggactgtgtgccttgtagcgctgggattcttgtccatgtgtctaaacaggttttgctgggctctgactcccagcaggccaggtggagggcaagcagagggctgggaggggtggcaaggcagctgggagtgggaagggagctggagtttttccttaggtaaaaataaatagagtggatatctgatattgccaaacgccgcttggcgatggggagaaagtgggtattttaaagaagaagcagaaggaccatggctgggtcccaaaatcaaaatccttgccttgccttgaaagaaaataagaaaagagaatggaaaagaaaagggaaaaaaaagtaaaaaaaaaaagatcaccagtgagtaggtggggagaagcagggccgggcagttgctggcccagctaaaggtgggggcagtacaggacacacttgtctctcaggcactccattcatgctttctcttttgtttacacttcctcgggggctttctaaatgactttgttcacgctgcctctcgtcttcattggctggggtgtggggttatatgcattggaaggcagggaggcaggcctctgagcgcagcagcccccaatcatccactcagacgcccagggtcaccagcacctcggcttgtcttctgcctcggccattgcttctgtcc

SEQ ID NO: 481148 - DNA, 1000 bp, Homo Sapiens
gagatggagtcttgctcttgttgcccaggctggaatacaatggtgcgatcccagctcacagcaatctctaccttccgggttcaagcgatactcctgcaccagcctcctgagtagccgggaccacaagcatgtgcgaccacacctggctaagtttttgtatttttagtagagacgggtcttaccgtgttagccaggacggtcttgccctcccaacctcaggtaatccaccctccttggcttcccagagtgctgggattacaggcgtgagccactgcacccggcccgagacttgattcttgaagctgcacacaggaatctcactttgacaaaccccctaacacacacaaacccccaccaccgctgccactgctgggacccctaattaaaaataataaaaataaataagtcagccaggcacagtagctcacgcctgcaatccatgcctaggatcccaggtggacagatcacctaaggccaggagtttgaaaccaaactgggcaacatagcaagaccccatctccacaaaaaaatttaaaaattagccaggtatggtggcacacgcccgcagtcccagctactcaggaggctgagatgggaggatcacttgagcccaggagtttggggccgcagtgagccatgacggcactactgcgctcctgcctgagcaacagagtgaaactctattaaaaatattaaaaattttttttaaaagttgttcctctcacataaagactgtaagtccgtcccacattgcctggatttttaacagagcagtgattctcagtgtggtcctgggtcccacagccagcagcatccgcatcactggggaattcgtgagaaatgcacattctcaggcctgttggcctcctggagaggaggctctggggtggggcccagccatcggcatttaacaaaccctccaagggacccgacacacacacctttgagaaccaggatggaaaacatgctttttcaacacacattccctatctctgcacag

SEQ ID NO: 481149 - DNA, 1000 bp, Homo Sapiens; identical to SEQ ID NO: 308125

SEQ ID NO: 481150 - DNA, 1000 bp, Homo Sapiens
ctggtaaaatgttatttggtaaaagtttattttgatgattctctaaaatctttccacaaaataagatttctacagcctgagaaatattcaggaatgtcttcaccactgtgtgctccaagggctgcccacccccagcagggcagcagcagctgtccacccatctgcccccacgcctaggactgccccagcaccccacaggtgaggaggagatgtctccaagtatctggacgattcgaagaaaattcgaaggaaactttggtctgctgaaatgtcttcacgtcctgaggacatgtatgagtgagtgacacagggaagtccttctcagaggctgaggcctgggcctggtacagtgggttccatcaggctgggccggcgctcaccgccccacacagccactccaacgcctctctgcagagccagcaccaacaccatggccaacactgccccccagtggacccagggatgtaacacatcccccaactcagccctggcggccagtgactgggggaagttttgtattttaagggctagaggcagctgatgtgggtggtgcagtcagggaagcccaaagccaggctgtgcggctcagcccagtgggacctgcctgggagcagagtgccccactgttgtccacaggctctccctctgccatgggagaagtgggaacacgtgcctccgcacacacctggtcccagctttgcagacctggctccttggctagggccgtggaaggggaccagctttcgtcaggagtgctgtgggacagtccctggacccctgtgcacttcctcacccaccctgcactggcttcctgcactacaggaggtaggctggagacgcagtgccgcgtcacacctcagtacttgggtgggtgtacacaatacgtgacctggtccgtggcccgtgtgcaaatgtcaccaaccgtccagataacgccctgacgccatctctcctgtgcagggtccagggtcccacgtggcatttctacactgtctctcct

SEQ ID NO: 481151 - DNA, 1000 bp, Homo Sapiens
gagacagagtcctgctctgttgcccaggctggagtgaggtggcacaatctcagctctgcaacctctgcctccttcagcaattctcgtgcctcagcctcctgaatagctgggattagaggcatgcaccaccacgcctagctaatttgtgtatttttagtagagacgggttttgccatgttggccaggctggtctcaaaaactcctggcctcatgtgatccgcccaccttggcctcccaaagtgttgggattacaagagtgagccaccacacgtggcctttatttttccaataagtggaaacattcattagagagtaggaacgcagattcttcttgtatgcatccttcagatcctcagacaacacggggatgtctttctgctagatggagaaacagtcttcttgtggcttctgtgactgggccctcctgttagactctgtaatttgaaggcaatgatcatattggcttttcattctccgccaacagcatctcatccagggctcttctctgagcgctcactgcacctccctctgatgaccacaggcatgggctctgacagtaataatcctctgtgttagcgttcacacaggaattccacaaagggaatcctaaagggattccacaagaagacagagcctgggtgttcaggtcagttttttgtttgtttgtctgttttgagacggagtctcagtggcgtgacctcagctcactgcaacctctgcctcccgggttcaagcgattctcctgcctcagcctcccgagcagctgggactacaggcgcgcaccaccacgcctggctaatttttgtatttttagtagagatggggtttcaccatgttggccaggatggtctccatctcctgacctcgtgatccacctgcctcggcctccgaaagtgctgggattataggcgtgagccactgtgcccggcctcaggtcagttttaaatggtctgagaataggtgcaggtgagttgggccgtcggtggcagcagaactgaac

SEQ ID NO: 481152 - DNA, 1000 bp, Homo Sapiens; identical to SEQ ID NO: 308126

SEQ ID NO: 481153 - DNA, 1000 bp, Homo Sapiens
ctaaaaaaagtgaatttattactctatggatgctggtgaactgccctccccaaccagcttcacgggggcaggcatctctgtccatcccatgcctttgggtcacagggggcagcaagaccaagaagaccacagccaggccctgggttcagcttcagagccatcacccgctgcctcccccaacccccaatctcctgagggaggagaattcctagggacaagacccagacccctttccttcagcctctgcttcaccaagggggcctggcctgcgcccgagctcctcctggcctgcccctcaggggtcccaggtcctcacctctgctcttcaggcaggaaaagggcagggagagaggaatggaggagggagagggaggctgggccgcaggagagagaagaggggggaaggaggagacattagggagaggccccttcacacagagagagaggccgagaaatcagggagaaggggggggctgaggtgagacctgagaaggaaagtgaaatttgggggaaaaggagttggaaaggaataggaaggcgttgggaagttcagacaagggaggcgcaggtggaggaggacgatgggagggaaggaggagaggaagaggccaagtggcgctgggagagagcaggtaccgcccgggggcagcaccaagggcgggagatggcgctggccgggaggcggctaacccaagggccagggcgggaaggggcctccaccatccgggcccggagctaccgccccctgcgcgctggccgctgcccggccgtggatgcgctggtggcgcagcacgtgctcgcggcgcccgaagcccttgccacactcccagcaggcaaagggccgcgctcccgagtgcgtcttgcggtggcgcaccaggtgctcgcgccagtagaaggtcttgccacactcgcagcacgcgtggggcttctcacgggcgggcagagggcgcagcgcgggcccggggctgccggggctgccggggtgcgtgtcgcggtggcg

SEQ ID NO: 481154 - DNA, 1000 bp, Homo Sapiens
aaggggtgtgtgtgattatctttattaataatccggtgggctggtgttttttctatccgtcttcatcagtgtttccagcccacctgggagacctcgttagcgcagaatccaaaaccgtgacctgagacggcagggctgtgatcgtcacggcaggccggcccggggggaaacaccttcgagggccaggccctgagagggtcggctcctgcccgaggccacagagcacgtccgtcctgcaggcaagagctgggaggcaggcgagaccccaggcaggtgcggggccgcccaggggcaccgaggcaaacacggaggcacgtaggagtccggggccatgtggtcggtttctttattgagaccacagacggtagcgcaggtccctgctgtccacatgccccttgtagggacaggaggcccttcccgagtccaagtccgaatgccgggtccgggccgagcccacggccccgagtacaagtccgggttccgggtccgggccaagcccatggccccgagtccaagtccggatgccaggtccgggccgagcccacggccctactggctactactgggaggggctgcttttgctttttggtgaccagatcttggacaagcggaacttggacttcttcctctggaggcctaggggacaggtggacagtgaggccgtgctcaacgccgcagccgcacagccgtggcccacacaagtccccctgccagaaacatccttcccttccactggccacaatccgccctgggcctccgagcctgcaggaagccctgtgccctcccacgtgagaacctgccccgactgggtgccccggagggctggtccccaccatgaccacacggtcaccagctgcccctggctctcttaggggcgggagggagctctcaccctcagggtgaacctgcctgtcctgtcaccaaggctgagggggggacccgatacccgccccccccccacccccagctggaggcccggtccacccagccagccagccca

SEQ ID NO: 481155 - DNA, 1000 bp, Homo Sapiens
gcatttaaaacatagttgctttaataaaataaagacaatacaataatttccagtaagcgacccatcttttttttttttcagtgcaatagcccttaataaggtgagtcatgtgtaatttcgtgtgcagctgggcatcaccaagtcacagtttccagcgtgctgctcagccctccgagtgtgtgtgctcatccttttcatagaagtcccatcggccatggagagggttgggctgcagagctgtgattgccagaggcccttccttgagaactgtggggaaggaggccctgggggtttcttctgtaggcagagctcaggccccagtcacctctgccaccctcagcctggcactgttgtgccagagcctctgctgcctctctcttcctacccatctgcagaccaggaacagacatcttcacatcctcagtcttccaaacccggaccatgccgtcttgactcccggtgatgatgatctggcttgtgtcccatgctgggccctccatcaggcagcaacaggttatggctccttctgggccccaggctgtggtgatgctggccaggggctgtccattgacattccacagggacaagtgtgctcccgcacaggagacaatggtgcctgagacgtcactgatggtgatggctgagatgccttcccgatgggcgggcaggcgggtcacgtgggtgaggtggtccagatcccacaggatacaggtgcagtcctgggagccgctcaccaggaggctgaaggtgactgacgctgccaggcacgtgacagcctgtgtgtgtccatacaaggcctgccggaggcgcaagcccctcgggcggcctttggtcatgctgagctcccacacacacaccacagtgctggtcccagaggtgacaatcgttgttggggatgggcacacggcgcacagacagcggccccaggcagccaggttctcgaatgtcatcaggaccttgtcggagccgtagctccccaagcagcagctgaagtcatcaa

SEQ ID NO: 481156 - DNA, 1000 bp, Homo Sapiens; identical to SEQ ID NO: 308129

SEQ ID NO: 481157 - DNA, 1000 bp, Homo Sapiens
acagttgcctgtttattatttttcaaaacaaaacaaaaacaaaagacattcaaaattcccctgtggtggacaactgagttgatgtggctgatccaggctgtctcccaggttgtctcagggagcatcagttgtactagggggtgggctgttgccctggcacggctggatgaacacttgcaccagggatggccatcagaagagctgcaggccagttttgagcccatgcagctgcccctggctccagagaaggccctcgaagttgctgctgctgctgttgctgcagttgccactgccgacaccacagctcaggcccaaggtgtcagtcttgcatgttgagggttccagccgctgctctagcacaggctggtccaaaagatacatggtgtcataattctccagcatgagctgctgggtcctcggtctgacctggcattcggcctaggggaaatgtgtcccatcgcacgtcttctgagctaacctgccatgcagagccctgcaaagctcctcttttctgggccagaagcctagcattctcggcagtgggggactcttgccctgtagagaaaggccccacctccattctgtcttcctcttcatcatcttcatcatcttcatcctcctcttcctcctcttggtcatcattttcttcctcctcctctacctggtctggcaagacctctttctcctccttctcctcttccttgacatcattaacactgccctgctcctcctgttgctgggcctttgcttcagacccgaagctggagctggctggcttgacgctccaatacaggctgtctagtgtatatggagacttcccaatgggggaggcctcagagccctcctgcaccaggctgttttctccactctgggtataaatggaacagatgcgcagcagcttctcctgctcctcgtctggcaggccctgccccatggctttgaagatgccaagtgagccgctgttactgccggcatgtgtcgcatccctctggtatgcttg

SEQ ID NO: 481158 - DNA, 1000 bp, Homo Sapiens
ctatccagggggcctttaatagctgagaagtgctgctctttcagatgggggtgccaagcaggccggtgaccccaacctccaccccctgcccctgagaagagactgggctgggccagagaccaatccacgggggaaaggccaccagcacccatcaggcttcccactggcaccctgaaacctgcccaggctgggccgccagcgtcgtccacaggccttggccagcgggggccctcagggaagcaacccagctcgcatctggaaggccaggcagtcccctcgggtggcttgctggggaagaaagcacacaggaggaggggtacatcacaaacagagctgggggcggatggcaggcagaggggccacacccaccttgttgatctctctgtgtcgttctttggttacgatttcctctaggacctcgccatctcccttaataagcctggtgcgccccgtctcagggtccaccaccttgcggatgatgctctgccgggcatcccactcctccttggtcatgggcttcatggcctggattcgggacttctgctcatccgtcaggactgggccatcctcttcctccccagctgatcggtgccactggtccagcgaggggcccggcagagcctccacctgctgtgcttccgccttctccttgcccttcttcttcagcttcttcctcttcttcttcttcttcctcctcttgtccttgtacttcccccgcttcttccggccatcactggaggaagaggaggaggacgaggaggaagaagaggagctagaagaactggaagaagaggaggaggagctggatcttgttctcctccgggccttctgcttgcttctctctgtgatgcagggagaaggtgaggctggaaggccaggaggggaagaggtaaaccttcgtcccctgctctggcctggggcaggcacagaccggctacagggtgagcgcttcctgaggggctttccagaacagagatggagcttcccagaggagcccctt

SEQ ID NO: 481159 - DNA, 1000 bp, Homo Sapiens
gactgttgctaagacttttaattgctctggaaggaggcagctggctgagtgccagtgtggggaggtgggtagaactcatcccctccccagcaagaagggagggtctggatggtcccttcagacagcttcatagtaggtgaggtcctgatcaacctcagttttgctgagacttgggctgggtccccaggtggactcggccttgctggaagttgagctcatgccctggctcttgccctgggcaccctcagccttgctggacctctggccctggccttgggcatactcagtcttgctgaggctccagtttgagtcatagaaagcctcagtcttggtggaacttcggagcagtcccctgcttcggccctgggtggcatcaaccttgctgggtctccagctccggccacgagcagccttgacctttctgggcctctgccttgggctccgggtggtcttggtcttgctgggctcctgccttgggccctgggtggcctcaatctcgctggagctctgcctctggccctgagtggcctcagtcttgctggagctctgcccctggccctgggtggccctggtcttgctggagttccgcctctggctttgggtggccttggtcttgctggagttcctcttgtgtatagtggccttggtcttgctggagttccgcctctggctctgggtgggctcagtcttgctaaggctctgcctctggccctgggtggccttgatttttctgggaccatggcttagtgcctccctgttgttcccagagtccgaggattgcgtcttcaacagtgacgagtcagagaatgtcacggcggtggctgaggtgctcctgtattcctggcagatagccgacatctcagtctctgaggtgcctgtggtcctgactaggaagggggtgccaaaagcacccatcaggcctgccgcacctgccctggacagctctgggaaaaggggcttcccaatctcacactggcctgtggcccagaggcttcgcatc

SEQ ID NO: 481160 - DNA, 1000 bp, Homo Sapiens
aaaataaagttatttaatagtctccatttaattggtttatttgctgttaataaattggcaacacaaggaagggccccatgtccaggctcaggcaggagcggctgcctcaggcagaggcagggcaggcacagctgccccgtgcctcaagggatggagggaaaggcccctcacttctgggagaacccccttggatgaacacagcagccaatgagcaaacagaaccagaggagctacaggaaaatgaggcagaggggcaggcttgggggaaggcagcattctctggtacccaccacccctgcccagggctcagaagcctttgcctgggtccaaaggccagggacaagggaggcttggctcacagatggggggtgggggtcacccatatcttcctccccactctgggactgactgacagccaagaaaccggcaggagctcacacagagctaatgctaaatgtcctcttacctctgggtggccctgggccccagggttctgaaggaaaggtgggcatggtaccctgtcctcattatggggactgaggctctccatgacctagggccctcagacccagggggaccaagggcttttaggacttccctcccaccaagcctgtacccaaagacctggggcaggcagagagcagcagggaggaacgggaacagggcagggcgtgtggcatcgtacccacgctcacccacactggcccagcagcctcccgaggcctggcccaaggtcactcctcagtgaagtccctgtctatgtccatgtagggctcctcaatgtagctaacgagagcagagggtgactgccggtccgggttcaacaggatggacactgtctccttccagtatgagaagctgatgcaggagctgttctctaggcaggtgctgtccttgtccttgtgcaggtagtgctgctgccagaagcgcagcaggttgtggaagttgttgagcaggaagccggggtacttcttgctgtgctccatccgctgcagcagcc

SEQ ID NO: 481161 - DNA, 1000 bp, Homo Sapiens
gatattgtagacctttattttctttaaatctcctaataaaaacattaaactttcaagaagattccaaactgacattgcatagaccaactcctttccaaaaatatctctgatatactctccaactctctcaatatatagaatttgaagtccaggagctgtgggcacctggtgggaattcactgagctcaaggggacaagagggctgaggacagggctcccacatggggacaaggccaggctttctggcctctggttccagccagcatcaatttggttgtggccaaattctcagtccaatcaccctggcccagggcctggcgtgggaggatgtggcaggctctgtctccttctggggttcctggtctggaggagtctccccaacagcgccaaagctggctgttttccgcccaaagccccagaactttgaatgagaggcaaatctaccctgaatgcacctccctcctaggctgggtgaggtcacgcagacacagaagggcaggacagaactccccatcttctgggggccaattcgtctggacactgtgcggtcagcttcctttttaaagtgccagtatcggtggggcaggaagggactctcagggctgagcagagccttctccagcgcgagcaaacactctgtcccgcctcggcaggcaccttctaacattcattttctaagggttaggtgagtaaaacaacaacaacaaatgctggaaatgctctgttcccaatgccagggagttccaagaccaagaagcccaactctcaccagcgggggcagatggggagctagggaaggaaccctcccagcctggggagggcacctgcacccctcccagagagagaagcccccatcccggccccccagctgggccccagcgctgctggaaccagccggcaggtggggcagaaaagcagcacctcccctcaccagggcgaggaggcaatattgaaccgtgaactcaagaagaaagacggaaagaaaaaatgaaaaaagcta

SEQ ID NO: 481162 - DNA, 1000 bp, Homo Sapiens
gtcagtgccaagattttatttagttaaaaaacaaaaaatctacacactttacaaggaacgttggctcccctgaggacttcctagcattcaactcgttcagttaacccctattgcccatgctttgacctctcatgcatctggccccatagaaaccatgaaccttgtaacagattgatgcctgagaaaaagtcaatctacccgtccactcctccactcccaatacacatacccccatgggctgttctaattcgggggcagccagaggtagccaagaactctaagtccagattcctttcacctccaggaacctagagtacatagtgtgaaaaatacggttcaggcaatgattatgttaatgacgccatgcacattcatttttagtggctgagtaatttaaaacatgatgtgggaattcactgcatttccccaaatgtaagaactttttagttttaaaatgaaatttatagtcactgtagaaaatttggacactaaagtataagcaagtaaaaatcacccccaaattcatcattcagagaaacactattttggctgaaccattcacttgacttgagttatataattttatacagtacatattattttgtaatctgtgtttttgacttacttactttaccaaaataattttcttatgtaaataatagaatatagatttagagtgtttcagtttgtggaagcctcattttatttaaccaatttcctattaatggacatatagatttttaacaattttctactattaaaataatactgtaatgaatatcacatgcaaacatcataccacactcgtccagttatttcttagggttcttaacatggaagaggataaatatatatttaaaatttagatatctacagcttaaccctcccaaaggattaaacaacttacattctcaccaaggtagtcctttttttgccctcaccctcattgacactggatgttgtcaaatttaaaaaaaatccttaacaatctgatagatga

SEQ ID NO: 481163 - DNA, 1000 bp, Homo Sapiens
aaaatctcagatgctgctttatttaccaaaggtgctggcttggggctggttctgctggccaagccagcggatggctgtgggggtcccagctcagtcttccaagggcgagactgtacagccttgctgtggggggttgggggcagggttccctcccggggccctgttggggttcccgcccagcggcagccagggtgggcagtgggtaccagcactgccatctcaggaaggcactttcagcttcggggtccccaggaagaactgcaggacgcggtcggccaggagcgccaggcagaagtccaggagcaggacctgggcaatgaccagcttgaactccacagggatgtccacgaggccaaactggctgttgaagtcgggcgaggagccgaggagcaggccaatgatggccaggagtgaaactgccagactccacaccaggggcttgttctcgggcaggctctccatgaagggcgggccctgtggggatgagggacagatggcttcatggggtggggctgggtgggcagacagtgaatgtttgggcagggcccaggccttactttgtaattgatggcgaaggtggccatctgcatggccatggccatgatgtagacggtgctgttgaccaggcttggctcaaactccttgtacaagtccacgaactgctcctgcttctcggggctccgggcctgggcctcacggtacaggtagacaaggctcaggaagtgcacaaagaactggagcatgacggtgaggatggtgtacaggttgaagatgttgggcaggggccgttctcgggagagggtcttgaggggcttggaacgggagatgaagaggaagcagccggccagcagcagcccctgtagggtggcctggaagtcactgaacttgactccctccaggtagaggacgctctggctgtaggccaggatgagggcattgagcgccaggatcttgaacatctgtagcgtggtcaccagcgtgcagcggccctgcttgatca

SEQ ID NO: 481164 - DNA, 1000 bp, Homo Sapiens
caagtctttaccattttatggtatcaaatttcttaagctcatagtgacaacagtacgaggatggtgcttttgacctacggtctcatacctcccttccttcagcatcctcgctagacccagccttgaaccctttgtttggcatgaggtagggcctcagtgcctcagtggcattcataattattttctttccatggtgaggttgggagagagttgagctcttctctagaggaggggcccaggtaaggctgagagggggctccgagaagctccttcctccacagccctctcccagcagccactgctgtcctccacaaaggcacctctggctcctccacttcctgtgatccaaatggtgggggaagagcagcaggcagggctgctcctcaggccaaaacaacctggtggtgggagtggatggcacagaggagaaagcagtggctaggagtcaggtggagatgatgttttgctccctgagggctccaggtcagctttgctcaaattttgttttcatttgttttcacaatcgtggagggagaactctctggaggcttgggaaggtggaccccagctgcagagaaacacaggccaagacccacacaccacagcccaggtcttgtgggtggacaggagaagtggttctgattcccgtctgggaagtctcagggacacggttcaggagtaatctacaggagaagctgaaggacagtggagttatctcccttgctccttatctcccttccccagtgccaggcttcctcctggcttcttcccagaggccctctggtcaagatgaacacattagccaggaagacagacactcaccaccagccttgggcatacgacagtggagctgacttctctgggaagagatctgagagtcagggggccagggaggcatcccccttcccagccgctgggtgtggctgacctccatgtcttccaaccagtctggcctccactcccacaggggcagggagaggttgggggtcaggaagatctc

SEQ ID NO: 481165 - DNA, 1000 bp, Homo Sapiens
gtttctcaaataaatgtttaatattaatcattcccaaactgacaagaacacaaaaataaaatgcaaatacagagccagctttgtcacccaaatctgtgtctatttctgatagtccatggaatgtggttttcttggaagccagggttggtctccccacagaccccaggctaaggtcaccagttaggaacccaggacttggaaggcagagcctgtgagctcttccatcagggatctgactccgcaaaacgacttgatgaatgcaattggcaaactcccatgttcggacttcatatgcatgagccgttggacagagggtttcttagtatatactttaatgcatgtttatgtgcaatcttgttagtgggtatacaagtttgtgaagaacttctcatttcaataggcagttaatgtaatgcattaaaagcctgggaatttggggctatatttttcctttctgactcaataatcttcaaagaattcataggaaagtcagtacttgcagacaagtggttagcttggctaaaatgtacaaaacacccagaacccacaaaacactcagaggtttaggagaatgttttaatgcttaagaggcaggatcaagtgaagaggttacagaaatcagtgtctctggctgggcagtcaagagagcgggctcaaattctgtgactcacttctctgtgtctcggttggaaatgaatgggtatcctggttcccaccttcccacacgctgtgatacttcaaactccttgggtgaagggcctcttctcagcccaagatcttgattgtgaacattaacaaagagaacagtcatcctccacagaagataactcattaatgacatttgattcagtgaataaatatatcatttaaaaaaatattgtagggggatcatgaaagtagtggaggtaattacaatcaggagagattggtattaaaattgagcaaagtcccaactctcaccagatgacaattatgcatcctgctagatgccccagggctg

SEQ ID NO: 481166 - DNA, 1000 bp, Homo Sapiens
atttttaattaaggaggaggtgttgtactctaaggaagctatctggatgctgctggctgaaatacagatttgatctcctcgtgctggttagctaacatcgattttctgccccagtggaagagatttcactctgatgcatgccatttaaattcattttacacagctgcttaatgtggtttggcaaggcacagtcaaactagctttgtgggtctaaagaggcctctggagttggtaaaaggacagatcctatggattagctgcagatgatgaatgcttgcttcctccgactgttatcttcctactgactcatgaattgaccttgaaggtaccacaagaaagtaagaaagaggaaaagccaatttcccaagaataaccatgtttacctcattctatatttgttatttcactttggggatgatgtttacaggattctatatttgttggtccacatttagggccatgtttacagactttagaactctcgattccaaaattatcatttgttctgtctaaataaatgtaaactgaatataaaactactaaaaagctctgtcaggcattcataaccagtagtgaaagcatagttctataagtttactgtttaaacaaagctaggtgatagttccctgtttgattttaaccaaagatggggcatgtctctactaaaactaactaccaaacatgattaagtctgcccaggatgatagcaataattattttttttagcaattcactcaatagtaatagactttaagagcatttactaacctaaacatggtgacagaacctgatattacacagttttgtagtaggaaagaagagatactttttgttgctgtatgtaattcctgtgttgaaattgagaataatatggcaacactgtgtttagacagaaaattatctgttggattattttgttgtattttcctggtgacttcaatattctgatactcgctggagaaaaaataatagaagtttttggcacagacatttgcttggt

SEQ ID NO: 481167 - DNA, 1000 bp, Homo Sapiens
cagcaattttagacacaaaggttttaattaaatgaataaacttttatacatacacactaaaagttacattggagttgggatgtgataacccttaacttcaatttccttgcaactagaatgaaaaaatacagtctgaaagtatatgatttatagcagctctgacctaaaaatgaagatgaaggaatttagaagtgatacagaatttataataaagacacctgagttgaagtcttaccaccctttcttattaagtatatgacctatagtaagttatttaacttctttgaagtctatttgcttgtctgaaaaaggcagttaagaatacctgctgcattagtcggggttctctagagggacagaactaataggatattagggagttcattaagtattaacttacacaatcacagggtcccacaataggatgtctgcaagctgaggagcaaggagagccaatctgagtctcaaaactgaagaacttggagtctgatgttcgagagcaggaagcatcccgcacgggacaaagatgtaggctgggaggctaggccaatctctccttttcacatttttctgcctgcttttatttgctggcagctgattagatggtgtccactcagattaagggtgggtctgccttttccagcccactgactcaaatattaatctcctttggcaacaccctcacagacacagccaggatcaatattttgtatccttcaatccaatcaagttgacactcagtattaaccatcacaagtctactgcttgtcaacttgaacccatacacatctcctgagatcatacataatattcaaataaagacaataacaaggtcataattacaattcacataatacaactatccttcgtacaaccggaaatgcaccaatccccaacccaaacactattacataaagttaacactgcttaaatgctgatatgaagtcaataaatcttctgtcacatgataaagggaaaggtttttgtttgtttgtttttg

SEQ ID NO: 481168 - DNA, 1000 bp, Homo Sapiens; identical to SEQ ID NO: 308136

SEQ ID NO: 481169 - DNA, 1000 bp, Homo Sapiens
aactctcatgtattggacattggcacccaagaacaggaagtccttatggatctgcagcccaaggtcgtagagctgaacacgcttcagcagaggaagggggaagccttcggccaacttatcattgaacttggggtagagggtgttaaggatgtaatagttgaggagcgcttccaacagctctgcattgaatagtccaactttggattctttcagttccacttttacctttcctggcttcaggaacccagtgatcttgctggtattgaaggtcaaggtggcggacacattagtggccacactgagccggaagacaggctccttgctggagctgggcaggagcacaaaggcatctatctccatataggggtccacagacagattcccagggctgaagttcaggagcggagcagagggcactgatccctggagttccaggttcatgttggggtagagcctggctaaccgtgggacgaagggtcggaaggacttggtggtcagtcggatattagagtcaggcggtatcatgtcatctgtgatggagaagttcagatatccttcctcatgataaaccaggctggccgtgttgaagacataatccgagatggcaaagtagaccattttgttgtgttcctcagctgcagcaaggagggtaactggagaacggtggttacgatgaaagatttcacccttaaacatcacctccagcatctgggctgttgcccgaggggcttccactaagctataatcaatgtcggcgaaactgtcaatctctgttgtaactggcagagtttggagataaggctgtagatcggaggacactgatttctggatcatttcgcaaatcctgctctccagtactttctggaacttggactcaatctggttgtggaagaggttcaagagccaccccgaatctcccgacatgtccacctccacgtcagcgatgtcactgctgcagctgaggcagtaacctgtgggcctcccggaggactcgctgccc

SEQ ID NO: 481170 - DNA, 1000 bp, Homo Sapiens
gggtgtgagcctgcagtgtgtgcgtggcagtttggtttattggtagtgtcgtctcagcagcgtgccacatggccaccatctgcgggctgcctgctgccctcccaattgtccttggccctctccctgcccagggggggctgggccactctgcccgctcttcctgggaggaaacatgggcagaggggcccatggtgggaggggagagagtctctggctgcagttgtcccaccactcagagaaaagaagtggctgaagctggtcctgactagtgggaggcctgggagcagacacggtggcatttccatggaaacacaggtgtgcaggccgtgtggagctggggatgtaggagtggccagtgcccggtgtccacggggtgcgagcggggacccgccatctggggaggcaaaccacagagctgctcacagggcgaagagggcatcctctgaccgctctggcttcttccggccagaagggtttgaggctggggcaggagcctccatggggggcgaggggaggtcgtgaaccatttcagcagctttggctcttacttccaggaatttatcaaactcttcacttgtgacaccctcctccagatcatcacccttcaggtcggtcctgagccacacctcaatgtcgtccatgacagatggctgcgcaacggggatcccttctgaactctgttttcgattgtctagtgcagaagcaagtcctccgacagcctgaggatcctcataggttaccgtctggcgctgctcagccaaggagtttcctctcgtctgggcaaacatgtcaaagccgtcacggggattacattgctggagtgaactgagggtgccactgacgctctctgtccccaagtctaagcctgcaagctgggaggagagggaagatgggggtgctgtgctccccaccatggggctaaccacagcgggggatccggggcccaggtctagtaagttgtcttcagtaacttcgcttagtactccattgctggcattct

SEQ ID NO: 481171 - DNA, 1000 bp, Homo Sapiens; identical to SEQ ID NO: 308139

SEQ ID NO: 481172 - DNA, 1000 bp, Homo Sapiens
ggtacccaccggccactgggagcccagggcacgccccaccgcagttctgccctccctgacagggtcctggacacccccagtcctgtccgggccgccccgacgggccctcggcgcccccgcccaggcctctgccgtccaaaccgggtcccggacgcacctcagcccgcgctccacccgtgccccgcccgcgctcaccgcgccacgctcgaagtcgttgtagaagggcttgtccagcaggtgcttctcgctgcagcccgccgagcccacgaggctgaggtagatgtagtcgtcagtgccggcgaaccactggctgccagtggccacggtgaccgtgtaggagggcatggcgcgggccgcgggagcagcgagcgccgggagcctcggcgcggcggtccaggtgtccgcatctagcgccgcagcctcctcccaccactggtccctggccccggtcccggccccgccccggtctggctccaggctcccggctgcccccgcccccgcccccgcccccgcccccgcccccgcagtacttctctcccactcttcacgcgcggcgccgactgggcgggacctcgcctcgggcggggcaggggcctcgctcctgggtctctcctcagcgaggtgtctgttcctgcagccaggggactggggcaacctcggctgccacccctcatccattcgttcactcgttctctcctgaattgcttccaccctttgccctgcctgcctgcctcggcttcgcccaaggccaggctcctgtaggccctggggtggagctgcggggactccctacaaatctaggcacagcctctgctctccccaagttctcagtgccacttgcggtacttggagcagggggtgctccgggagtctgcagaggaagagcgacccatgagagaatcagaagggcttcctggaggaggccaccccagcgctgatactgaggatggattctggagcacagaggctccttcaggcgcgggcttcttcactggctgga

SEQ ID NO: 481173 - DNA, 1000 bp, Homo Sapiens; identical to SEQ ID NO: 308140

SEQ ID NO: 481174 - DNA, 1000 bp, Homo Sapiens
ttcttcctgatttttttttcctcctgagaatcacattaaaggaatttattatctatatacttttatcaatgaaaaatcaatctaaagatcatgattttaacttcaaggcaaatttcattagttcttttctttgacattaaaatgtgaaattctttcaacatacccaagttaatgaagaacagactgaaagtcaatggtattgtcgatgcatgaagtgcaaacttttgtctacgtaccaagtcctcatggttaggtggcagttttgatgtatatccatagggaaacaatagcatctgggagtaggaatggaaggtgatgtaaaccttgatttcattcaggtggcttctaatgaaattagtgacagctttcgtctctttctcggactctggtgcagagccccgatagttatctgcacatgggtcattggtgttaggaatggctgcagaagacataggtggatgagaccacagtctgctccccatccatatagctcctgcctcttctaatgtattatagattcacagaatgttttaaatgtttttgcctctcatgtttacagggctgcttcaatgtctcttgtatcatagtcactacagattaacattgcacacacatgccagattgtaacagacttagcccactggaatattctaagccttgtttacttccttgtcctttcccaaggccacaggagtaataaatcagaagcagccatgacttggagccagatacactccagttctaattcaaccccagctctaatgcgctgggggctggtgtgaattaccttccctgggcacaagtttcttcagcctttttcagcagaaagctctcaattagagatagctgctgctcttctatgttcattatggtagaatacagttaaaagctcaggtgatgttttcaacaaaattaggcacagaagaaatatataaattggggcaatggtaatttctccttgaaagtgtgcagtgatgaagtcatagttgtatagcaacta

SEQ ID NO: 481175 - DNA, 1000 bp, Homo Sapiens
tctagattatcttgattcagaaatgtttttgactttgatgcataagagatgaaaagcaaatgaagggagccctgtatttgccacaatttacaataggaaaatcctgcaaaaaacataccagattccattcacggattccaaggtagagagggtttagagaatttatggctgagtgagtgccttcttagcttccttctttttatgtagttatttttctaattaatactagatatgagatgaacagaatctcctattttgggtaaggtgggccatgatttaaatatctcaatatcttcccaaaagaaagcagatttacaagatgaaagtatcacaccagaagtttattatggaacaatcacatatgttgactctcctttgaccctcactgcagtgcactttcattacttatcaatctgggggcgggaaaaaggggtgcagccagacaagagaatatacaggaaagaagcattgtatataagcctatgtatttcagtaatgctgctacagggggatacaaaatcaggtgccagcctccagaaaaaaagagattttttttcttccctcagtctcatttggtccctcggcgcttcctgaagtagcgattataggcagcattgtatccataaaccatggcgtagcgttcgcaaagtctgtagtcatcacaggcttccctattgagctcgtggacaggcttagagcgttctcggatcctagaaagtggaagaagaggccaaaattgagaaggataaagtggaaaaatacaaaaatggaaaagaagaagaaaatattggagagactttctctccatgcccccctatattaagagatatttaaagaacagggagaggctgggtgcggtggctcaggcctgtaatcccagcactttgggaggctgaggtgggtggatcacttgaggtcaggagttcaagactagcctggccaacatgacaaaaccccgtctctacaaaaaatgcaaaaatagctggacatggtagcacgt

SEQ ID NO: 481176 - DNA, 1000 bp, Homo Sapiens; identical to SEQ ID NO: 308142

SEQ ID NO: 481177 - DNA, 1000 bp, Homo Sapiens; identical to SEQ ID NO: 308145

SEQ ID NO: 481178 - DNA, 1000 bp, Homo Sapiens; identical to SEQ ID NO: 308146

SEQ ID NO: 481179 - DNA, 1000 bp, Homo Sapiens; identical to SEQ ID NO: 308147

SEQ ID NO: 481180 - DNA, 1000 bp, Homo Sapiens
attctgaatcatcagcacatatctgagataatgacagggatgggccagtgagagcatcctgtgcatccagtgggatagtaaagagagtttcagcttttgaaatagggctgagctgtctccatgtcagccttggctcttgcctagtagcgggcctttgtagaaaatcaaaagggaaaatgggacagtttccttcaacaagacgttttactaaactaaacttctcatacgtccaagagtgaagttctgggacttgctgctcctgacacatcactgaggacagatgactggcatttgcacaggaggtcagagagcaggaaccattagagggctggggctgttggaaaaagccttacctatgagatgagactgggaaagtctcccaagaagtgtctgtgttcaacgaatgtggatcagaaagaacaacagtgataataacttggagcaaaagttccaaggcagaacctaggtagcactattggagaacactccagagcctggtttgactgcctcagagacattatataaggagcttggagaagtcatttggggagttgaaaatgggccaaagacatagagggactaaaatgccatagtaactagtgtagacactctcatctcttgctgcccgaagtgtgatctatggaccagcagcatcaacatcatctgggaaaagatagaaatgcagattctcagggcccactccaacctcttgaatcagattctgcattttgacaagatccccataggattcttgaacacactgataattggagaagtaccactccagcatttagtggaaacacctggtactaaaactgaaggcacgctcaggaatctccattttcaacaaacatcccacgtgagacaaataagaagatggcaaataccaatcagtagtgaggagcatgttggtctgatgaagattagtaggatggatgtaagagacaagcagcaatcatttaaaatacactaacaataatgtagacatgatgatatttat

SEQ ID NO: 481181 - DNA, 1000 bp, Homo Sapiens
tacaaggaaagactagcaccagggactcaggtttccttgttcctggtctattggaacaaggaagcccacccctgaatccataccacataaccaatccccaggctgccacaccagccctggcagaatggactacattttatatcccctttggcaaaatccctaaagagcttattcctgaacagaccaaaatatataaaggcattgtattttttaattaaataaaaatgttttcaggattatcagcccatgtgaatatggaatgaaagaaggcaaagagcggtatagtttgttctcttccttttctggtgagcatctgcaggagcagtgtgggctcagtgtgtacccactgactctgtgttcactctcccttgaatcccctgccactagacttcctctctactcactctggtgaaattactattactttcttagaggttctttctgaggccaagtccaaggccttttcctggcttccttccttcttgacccctttgcatcctccagcactgctgataccttcagaaattgtctcctttatcagcactcagaattccttctcccatgcttctctctctgcacctttacctcctcccacccgtgatggtgaatatttctaaagaaactgttcttggcaatctcatacaagctttcagtttcaattgtcgtctctatgctgatgactccccaaatgatatcttcagttctgatgtctcatctgagctccagactcacactctctcattcatattcatttgctctccctttttccctctgcctcctccctccccttctggcccaggcacagtactaggtgtgggggtttacccatgaaggccacagtttctaacttcgggttccaggttagtgggagagagacaggcattaactcacccaattacagcacttctgacaatttgaaaaatacagggcaaagatgtacctaaggttctgtgggaacacaggtaaagtaaggttactaatgtttcactctctctgggta

SEQ ID NO: 481182 - DNA, 1000 bp, Homo Sapiens
gcctgccacggcctcccaaagtgccgggattacaggcatgagccactgcatccagccccttctgttaaatgaaatacacatatatgtatataatcaatataagtaagtataaacacacacatatacacactgcattgaatctagcttgcatctcattaatgagtttatcatttctcaaccaaaagagttcaaaacttagactgagactggccacaatgccagatcaatggatttgttaggtcattccatagaaccaaggggtttcaaagatggggagaccttgtaaataacaaagtccattttgtctatatcatagattaggaaactgaagccaagagatgttgaatgatttcctaaaaccacttagtcagtgaattttagagctaaaaccatacattaaatatgtttcctaccatatcacactcaccaagtgcctaaaaaggagcatggaaccctcaagcttgtgatatggtgtcacaaatcacaaggtagaagatgccattttaacttggtctgctgatttgagtgtgcaaattagtaaaacttaaaaatacatattgatggtgagtatattttttgtacattggaaatattttgtagtaaataataaattagtcaaaatcagtcgccctttgtaggcatagttcatcaatattatgatgttaatattgttgaaatgactgagcacattcaaagacagaatctacaaactagcctatttggaaagggaattgcctatgtaagtcgtaacttgagggaagatcaaaggaatcagttcctaaacatgagaaactaagctttctttcattgaaaaagctagttagttgtattgaatcatatctaatgttggggtgagcgataaggagatagaggtgatgcctaaagagtaggaataaagtagtgaacattgctgtaatgttgatttgaaattctctttcacttagtgaaattcattgctcagggaaaagattctccttcaaggaaaggttgcttgcaaatt

SEQ ID NO: 481183 - DNA, 1000 bp, Homo Sapiens; identical to SEQ ID NO: 308148

SEQ ID NO: 481184 - DNA, 1000 bp, Homo Sapiens; identical to SEQ ID NO: 308149

SEQ ID NO: 481185 - DNA, 1000 bp, Homo Sapiens
atggtgggttatctttttggtatgttgttggattcggttagctagtattttgttaaggattttagcatcaatgttcttcaaggatatcggtctgtagttttcttttttggttaggtccttttctgattttggtattagggtgatgctggcttcagaagatgaattaaggaggagtccttctttctctgtcttgtggaatagtgtcaaaaggattggtaacaattcttttttggatgtctggtagaattctgctgtgaatccgtctggtcccggactttttgtgttggtaatttaaaaattaccatttcaatctcactgcttgttattggtctgttcagggtatctaattcttactgatttaagctagaagggttgtatctttacaataatttatccatctcttctaggttttctagctatgtgcgtaaatgcgtcatagtagccttgaatgatcttttgtatttcagtggtgtcagttgtaatatctcctgtcttgtttcttagtgaggttatttggattttctctcttcttttcttggttaatcttgctgatggtctatcaattttatttatctttttaaataaccagctttttgtttcatttatcttttttgtttgtttgtttcaatttcatttagttctgctctgatctttcatgataacttcctttcttctgctgggtttgggtttggtttgcgcttgtttctcttgctccttgaggtgtgaccttagaatatcagtttgtgctctttcaatctttttgatataggtgcttagggttatgaactttcctcttagcaccgcctttgctttatcccagaggttttgataggttgtatcattattgtcattcagtttgaataattttttaatttccatcttgattttgtttttgacccaatgctcattcaggaacaggttatttaatttccatgcatttgcatggttctgaaggttccttttggagttgatttccagttttattccactgtgttctgag

SEQ ID NO: 481186 - DNA, 1000 bp, Homo Sapiens; identical to SEQ ID NO: 308150

SEQ ID NO: 481187 - DNA, 1000 bp, Homo Sapiens
aaggaaaaccatgacagtctcttgagacctaaccttgtagttggcacatcaacatttcatttgtattctgtaggccaaaccaactcacagggccagccagaatcagaaggaagaatgcaaaattacagggcaaagggtgtggatgtaggaaggacattaattgaggcttcactgcaatcacattgaacacatgaatatgtgttcataaatatgtgaaaaacacagaattaggcagagtaaagggaaaatttcctctttggtcttctactgttctactttcttccctaagttacactattaataattctgtgtattcttccaggcctttatgtgtgcatctctacatagggatggggagatataacttcccttgacaaaatgtatagctctaggtagactttataatatatttttatttaaatgttaattataggttgtatatcccttatctgaaatgcctgggaccagaagtgctttggatttcaatttctttcaaatgttagaatatttgcatatacataatgacatatcttggggatgggacacaagtataaacatgaaattcatttgtttcatgtccaccttatatgtatagactgaaggcagttttatacagtatgttttaacaattttgggcatgaaacaaagtttcgactgtgttttgactgcaacctgtcttatgtcaggtgtggaattttctacttgtgacaccatgatggcaatcaaaaagttttgaattttggagaattttggatttcaaactttcagattagggatgctcaacctgtataaaataatgttttaaaatacagaaaacacaaataaaaacttctatatccatcactctgattaagtaatagaaatatttgtaacatagagattttccttttataaagaaataaaatgctataaattggaatataccaccatgtatttattaattgcttatttattaatatttaggttttgtatttttttgcgattgtgaatatttctgcag

SEQ ID NO: 481188 - DNA, 1000 bp, Homo Sapiens; identical to SEQ ID NO: 119909

SEQ ID NO: 481189 - DNA, 1000 bp, Homo Sapiens; identical to SEQ ID NO: 308153
  misc_feature (79)..(79): n is a, c, g, or t
  misc_feature (144)..(144): n is a, c, g, or t
  misc_feature (945)..(945): n is a, c, g, or t

SEQ ID NO: 481190 - DNA, 349 bp, Homo Sapiens
gttgatttgttttatttctatatggtacctttcctcctaggagctgcaaggcttaataagcttcagcaatccttttacaatagagatgctgcaaggagggcagaagctctaatcactctgcagaagacccagctggaggaaatgagatctcacgtggggatcaagggttgtaggagtgggaggaagatgtagagaggaggactttttcactggagacattgtaaaacaatgacatcctttgckgaaagggacarggaggcaacttccccggaggttcaggaaagwggattatagttgcctgtcggatgtwaaatgtaggatctggaagtcgtggktgaaaactaggctg

SEQ ID NO: 481191 - DNA, 1000 bp, Homo Sapiens
  misc_feature (90)..(90): n is a, c, g, or t
  misc_feature (95)..(95): n is a, c, g, or t
  misc_feature (101)..(101): n is a, c, g, or t
  misc_feature (109)..(109): n is a, c, g, or t
  misc_feature (113)..(113): n is a, c, g, or t
tttttggtaactgggggggccattaaagatctacactcctgtctaaatgaagacagtgtgctcactaatacagatgtgagatggacattncagcncaatgnaatgcccntccngtggggatcatggtctctctcaaagacggtgcgttgaagaatcggcacaccatgtcttctgtgtttatattggactgttatgcttataaactataatgagtaactacaaaccaagaaggaaaagcacacttctcatttgtccaggaatcccatgatcagaatgccaaacaacatataataacccataatgcatgcagctagttaaattcacaaatattttcccatacctttggcaatgggtgttaattcacccaaatattagaggaaaattatatcacactacgaaaatactaagaaacttcttggtattttctgaaaaagtcctaacccggctggcatttgagttaagttctgaagacgaggaaggggaaaaaaaatcatgaaaaagagcctcacattttaagtcagggctctggggtgatgttgctgaaattcctgttcgtaagcaaggtgaggagatatcctgatgaataaaataacaagatgagagatgagctggaagttagagcaaaggaagctggaagaaacagctacaggtgaggtcagtaacaggcagaagagctgggacgagacaaaaatacagcctaagagagaaagtcatggttaattatgaatcccacaaccacttagccacttctctactgatgggttcatatgcagacttctttttaactatgagcttggaatgagatttcagtcttctgctatgcccatactgaatcctgttttcctgcctccctcaaaaacgggaagagaaaatatggggtgagatttaaccagaatatctgaaattcttttgagagggaaaaataataaatgctctttttttttgagacatagtctcataggccggatggagtgcagtggcgcgatcttggctcactgca

SEQ ID NO: 481192 - DNA, 1000 bp, Homo Sapiens; identical to SEQ ID NO: 308155

SEQ ID NO: 481193 - DNA, 1000 bp, Homo Sapiens
catcattcctcagtgggcatctttattgggcatcagcgctggtgtggaggaggctcctggttccacccacggcttctcatggagtctccatccaagctgcgcaggctccagcaggccgcaggctgcaggcgacgggaagtcccacttctttcagtggagagaagctgctgtgtttccctctgtcttcacccacaggattgaccgtcccctctcccggaggaaaacccagcagcggcttcacccacgcacaagggagcccaggcagttcccttctgccggagaggctacgctggccgtcacctacccacacgccagagacatctgagtcacacacgtgagccacacgcccctgagcacacacatgcacacactcgcacacatgcacacacttgcacacacatggacacacgcacacacacttggacacactcacatacttgcacacactcacacatgggcgtgcgagtgcacatgcacgcacaccgacacgtgcacacacttgcacacagacacttgcacacactcgcacacacgcacatacacacttgcacacacacaaatggaagcccaagcccgtcctgtcggggatacttcgctgtccgacgtgtccagcagcctgggggctacgtgtggtctgggcagagtcctgctggccaccgagaggcagctctgtcgggaaggagccgctactggggttcggcccccgggggacccccttcactcatcatgtccttgtattgccgcttgaagaagccgagcttgtacagcgcggcggtgatgagggccaggagcagcagtcccccgacagagctgcccacgatgagcggcagggggttggggacctcgaacggctccactttggtctccgtctgggacctcacaaacgccccctgtcccggcagcagggtgaacacggaatcgttaaacaagatctcagctgtgctcacgatcaggaggtggttatgcgaggtcttgatgtaccagtcaaacgagaggttgc

SEQ ID NO: 481194 - DNA, 1000 bp, Homo Sapiens
gcagtttttaaaaacctaaatatttatttatttgcattatatttacaaaggtgggaaggagaccaaaggagaccccaagaacacccccacacctggctgaccaggccccttgcactgcagaggaggcagacacagctggaaggaacaggatttatgttgcatacttgaactacagcgagtgtaagactggtcctatttacagggcagaaacactgcaggtggagcgcgggggtggcagggtgggcaccagagtcctggccaagggtacccttgcctgccatcttccccacctctcccagatgcatctctgaggccccgctgggattctccggggggaacgaggcccactcacatgatgctcgctggggtgaagacagggcccacgcacagggtgtctgtgatctcccagccgcaggacagaggcttgcacacaccctccacgtcatcctcctgttctgcagccatcagctgccttcgcagcgcttccctaggggtgagagaggggtgctgcaagtagccagcatgggactggcagggccctgtacctggagacgcagccccattgggcagagggctctcacgtgagcccgagctcagctgagggcaggggcagggacaggctgctgacccctccccaactgcttcctactcccgtgtggtccccacccctcaacaagggaaagaaatccacatgtatcgagcatttactacatgccagacatcatgccaggcacttatattatctatttgtatcttcccaaaaaccccatgagggaggcattaccatccccgttgcattgatgatgtaatcaatcagttccccagagagagaagtgacctacctaagatcacatccctagtaggtagtagaactaggactgaacccaactctcactcgaaagcccacattcatcataccccaggcttgggacttcaaataaaatcatatcccattctctcaaacaatcccacaaactgcttctcctcctacatacccatg

SEQ ID NO: 481195 - DNA, 1000 bp, Homo Sapiens
gacatgtattggttaaaaaactaggccattacttctgcagaatttcccaaattgtgcatttggttgtttgcttctttgtgttgttaatttgttcttttattccccatgtttcctgtaaactggtaattaggtttggagactaacttgtacttctcagttttgggggagccaagaaaacttcacaggtgtccactgtgtgtatccatttcatcacatcaagttcatctggctgatctcatttagagatgttaatatagattagtgtcctgtcattctgctccatgcattataagcttcctatccatttttcacctaatggtcttcgcatccattgctatcaccacgaaaatccatgattttgtaaaattaaagagcgtagttttcaaattctatcattcatttgatctttgttttgttttgttttttgttttttgtttgagacagagtctcggtctgtcacccaggctggagtgcagtggcgcgatctcggctcactgcaagctccgcctcccgggttcaagccattctcctgcctcagcctcctgagtagctgggactacaggcgcctgccaccacgcccggcgaattttttgtatttttagtagagatggggtttcaccgtgttagccaggatggtcttgatctcctgacctcacgatccacctgcctcggcctcccaaagtgctgggattacaggcttgagccaccgcgcctggcctcctttgaccttttaaccagttggaattctctaatcaacaactttccttcaccaacttttggttgtcttgaaatatagtttgtaaaggataggcaaggtaaatattccattcttttcctttatttgttaataatgctctagtatgctccataactaatcaatgcatttggttcaggaaaaaaaaaagctcaaaggttggagtggtcatgataaaaggacacaggagccaatttgaggggattgcctcaaaatgctaaattgacaatttagcatttttaaaaa

SEQ ID NO: 481196 - DNA, 1000 bp, Homo Sapiens
gagccttctagaaatttttatttgaaaaaatcagtagatgtaacaataaccacagttaaatgaaagttaatcaaatcagttctattgaccaccaagtatctaggagccatttctcacctcaatggggggagggagagttatctaattgctattaatagtaatggaactaaaatatatctacatattatccagtgatttttttggtcttattatgtatttcctgaaataattaacttccatataagttgttttagctaaataataagcactttaattgagcgcaacaatcagattctggtcaaccactgaacatggagaacttctgcagattttctggactgtaatgaacaaggaatattcaaaatcataataataatgggtaaactttgcctgaagcgtggacagccttcctcaaagaagtcttgggaaattctgttatgtcagaatacacatatcagacggaggaacttccagagatgttcatttagttatcataccccatggcctcctcttctcttagaaagggagggcagcggtaggtcaccacaaatccctccctcctcctgttttaataagggtgattcatttatatgggaaaatgcaacaaagatttttactgaggaacactgcctacaagatggaatgtttttcttttaacacagagtattaaaaattcactccaaaaacaaaagcattcaaaaatatatacaagtttgaaacatttaatacatacttctgttcagagctgttaccagcttttaactatgtatgggccttatctgagactacattggagatcatgtagagaaaatgaggtaactcttctttgaggtcttcactgtttgcattcattgatgcttaaaggtaacgtctactagctcaaaagtttttagcaatctacatctcataaaagcaacaaagtgatggatgtttgataaggataatatttagcattcggttactttatttaagtggtaatggtgtggactgtgttagccta

SEQ ID NO: 481197 - DNA, 1000 bp, Homo Sapiens
caggattcacagaactttatttggaattaacaagctgttcatagatcactaaatgttgtttcacaagcttatagaacatggattatctttgatgaattattgaaacgatttgcatgaagtttatgactgcgtacagtgtattttctctgcaggtaaacagtcttgagttaccacatggattaaaaaaaatctatgaatttttttgtaatcataacaaaatattagcataagccttattgtttacagagttttaatctttcacaccatttcctttaaaataatgagctgcatttcacatgtgagctaaaattgttgggcagcccactacacctattgaagcgagatatagtcagctctcacttccctgtttcgtactgggggaccagtggtacaaatcagcaataaaacagtgtatgatgtcatgctacatagtttggtcttcacagtggaagatattttgtgtggctgttgcatatgatttacatttcttaattaaatttactcaggttaataactgatttgtctgcatcctagaaacaaccagctctcagggtttaggtgtgggttggtctgagtagtaggagcagccaaactggaattaaaatgtttgctgtgagtagttcagaaaggcaatttttctgtgattatagagatgagtgcaactacacgtgatagctctgtcttcattcattttctttttgtggtgcaggtgtatttatgggacccacaaatataccatttacctcacaagcaccagctgcatttcagggctttccatcgatgggcgtgcctgtgcctgcagctcctggccttataggaaatgtgatgggacagagtccaagcatgatggtgggcatgcccatgcccaatgggtttatgggaaatgcacaaactggtgtgatgccacttcctcagaacgttgttggcccccaaggaggaatggtgggacaaatgggtgcacccccagagtaagtttggcctgccgcaagctcagcagccc

SEQ ID NO: 481198 - DNA, 1000 bp, Homo Sapiens
ctgctcaatacatctcacttgtttctaataaagaaagcagctgaacaaaaccttctgtcctggtattcctggtcagcaggtggcagtggaagaaatggagtgctggagcctaggctggagccaggacgacagggcttggacacaaagtccctcaagcccacagcaccaggccagcttccaaaggccttcctttaaggctgcccttcttccagggcaaacttgatgttgtcagacccttcccacccgccagagacgagctgctattgacccaggttcactccaagttagagcagcaactgggctctcagccagcacctgagcacctcagcacaggagccggcccaggcttccctagctgggcacagagcagcccccttggtccaggtcagcagtggctcctctggtggaggtgcaggccccgtgccttcccactgtgcccaggtgccacatctctcctcctgcaccactggccgggtggttctttgagtcactaggggtgcattttaacatggcaagttgctgggccccagtagctgtgtttaagacttcccattccccctcttctcatcctctggaacttacccattccctgaccccctgatcctttcaggtccatgactggtgcctccaagcccctttccagggaaactgagaggacacaggacctgcctgacccctctaaagccccccaaccctcctgtcccaaaccaagtcactcaggctcctatggcccatgccttttttcctgcccttagctttgggctgagagaacatagccctatgtgttgtttctacccatgggcctccgggataaaaagctgtgatttcaggctgggcatggtggctcacgcctgtaatcccagcactttgggagggcgaggcgggtggatcacgaggtcaggagatcgagaccatcctggctaacactatgaaaccctgtctctactaaaaacacaaaaaaattagccgggcatggtggtgggcgcctgtagtcccagct

SEQ ID NO: 481199 - DNA, 1000 bp, Homo Sapiens; identical to SEQ ID NO: 308156

SEQ ID NO: 481200 - DNA, 1000 bp, Homo Sapiens; identical to SEQ ID NO: 343579

SEQ ID NO: 481201 - DNA, 1000 bp, Homo Sapiens
acagaactcagggtctatttattaggaaggagatgtcagtgctttatcaaagatgaaggggtcacagagggacaatgggacaaaggccctcagctgggacatttcttggccacaatgagaacagcagaaggcacgagtcccagctcctgcagaggccgctccatgtcagcttctgagaaggcccgtctggggaagccactgagcaattgcacagggtcctggcccccacctagttcctccccacggtggagctccacatagagcctcacagctgccagctgttcccgggcccggaacgtctgggtcagtgaggtcccatctggcagcctgacctgtatgcgacactggtcatactcccgcttggtgggaggctcctggctgggagaagagggaacaggacctggctctggtgccactgggggtggctgagagcccacactgccaccatacttcttggctctctctgctttgtccctctcgatcttttctctaactctttgtctggctgctaactcctcggcattttccctccgcctctcctcagcagcagcccggcgcatctcatcttcctgtagccgctgtcgtgctgctgacaactcttgcccttgtctcctgcgctgccgttcccgttccaatgcctcccgttcctctctttcttcacgctcccgctgcttctgggccaccagctccaacatcctcttagtttgttcctgtctttcctcttcactcaaagcgggtttgccttctccggcagcagaagcagatccttcaaggccgccttgctctgaggaagtgggctcccgtcccaggatatgtccaaggggagtctctaaaggctcgtccacatcggggtcgtcttcgtgctccatcagccagtccatcgcagcctcgatgccctggttccctgtgagggccagagccttctccgcgcgtcccctggggaagcccatctcgatgagactctcaagagccgtcagctccgccatggcgccgacaccgc

SEQ ID NO: 481202 - DNA, 1000 bp, Homo Sapiens
gaattcatgccaagtgcaagtctgggggtcaccttgactggagaccctcctcccgccacgttctttgaacttccctccatccgctccaagtctctcccaatgccatcctcagccctgcagcagccctcactcccgatgccttcccacctcctcaccactctgcccccacctggccagcccatcacctccagggcccaacttggagcccccaggacctccccgtgccctgcctgatgtcccgcctgtccccacagagcctcacttggtcaccacccagtcctggcccttgcttactgtggctgcaccccgaggtgtcctagggtctagcaggtggctgcccagacatggaggtagaggaaggagtgggtggggatgggcttgtcctgcccaggcctccctgcctgtcctgctggccacagccttggcttgcccaggagaacccatgggccacacatcccactgccaatcccacacgtcctttctcgggaacaccgtggggaaagctgtggcaccagctccttccttttgcaactctgatgaatctcacccagggatttcaaggcccctggtcacaccaggatcataggcctcccccatcccctggacacacagagacacacctggattcaggtcaggcctcgcccactctcggctatatttctccccaagccgtgtgtcctcagctgtagaatcaggaccataaggaagttccctcatagggttcttgtgaggacggcacgatttacgtaggggatgctcacaccgtgcctggcagctgggacgcactccacccgcggcagccgcgtcccatggcttctcagtgagttttccagccacactgcacttcttagacaggaacactccatacgatgtccctctcctgcactggatggcccaaaaatctgaaataagaggaggagtgcgtgtgaagctcccagtggagcgtttggcacctgtccagcatgtccccaagggcaagtcacggctctgagattcagtg

SEQ ID NO: 481203 - DNA, 1000 bp, Homo Sapiens
gcatgcgcacacgggcgcagccgctgacaggctctcagcgcgtgcgcggaaggcggagcccgccgggggtcacgtgttcatcgagacggcccccgcctccgcagccctggatccctccgctcccgcccaagcactgacaaggtttcgcggcaaaggagctttattgctgcggcggcagaacgagctctgcgaagggcgagggggcggcgaatggcgcgcggtcggagagtacgagcgcctcctgcagggcgcggctctgcgggccgctgagcgcggggccgtcccggtgcacgcggagccagggggtccctgcagagcgaggggctgttagaggccgcgcggccggagctgggcgggggtgcggggccagcagggcgggggcggcgctcaccacggcgcagcctctgacccacgtcgaccagcagctctgcgcccacccccaggcggagcggctccccagcgcggctgcgcccggccccgagctcgtgcagcaccagcgccagcggcagcgcccggaccagctccacggtgcctgcggggagaggggctgagaggcgcgggctcgggaaggggcggggcctcgggaagggaaggggatggcggaggcggaaggacggggactcccccgacgctcaccatctgcgggcgccagcagctcctcctgctcccgggcgcgaggcagcagctgccggcgttctgcgggacttcccgagcacagggctcgggtcagaccgggatccacgccctgcgccgccagcatccgctcgaagcggccaagggccgagccgtcgtccagcgccgcggccacccgggcagcgccctgagcctgagtccccgcgtgtccgctgagccagagcagggcgccccctgcgggcggggacgggtcttaggcgcggccgggtcggggcggccccagcgggaagcaccccccgccgcctccgctcccctacaccccgtccccctcaccgagcgtggtgaccaggtcccttaagtctggcgg

SEQ ID NO: 481204 - DNA, 277 bp, Homo Sapiens
tttctattgtgattaaaactcataatggagagtatgaggacaggtacattaaaagtgccctccagacaggcagaggaagaaaagaatgcaactgatgccactcaaaatacacacacacacacacacacacacacacacacacacacatacacatctcttataaacacttaacctggttttcaagaatatgtagcaagacaaagaaaattcagaatgtacctgtatcactttccaaaatgatttaacttcaggcctagaagaaaatgttttgcatttc

SEQ ID NO: 481205 - DNA, 349 bp, Homo Sapiens
gacactaacagtatgggggtttgtttgtttgtttgtttcattttgttttgttttgagacaaggtctcattctgttacccagactggagtgcaatggtgtgatcatagcttactgtgtcgtcagactcctggcctcaagtgaacctcccaagtagctaggactacaggcacatgccaccacatctggctaacttttttattttttgtagaagtggaggtctcactatgttgcccaggcttgtcttgaatccctgggctcaagcaatcctcccaccttagcatctaaaagtgctgggattacagccatgagccatctcgcctggtctcagtgtgccttttaatctctggat

SEQ ID NO: 481206 - DNA, 1000 bp, Homo Sapiens
gggcccaagtgcaatcacagctgtggataacaaatctacccactgagagagaaaacccatggaagccaaataactcagaacaccaacttgtaccttttcagactaagcttttatttttttgatattacaaaccagttttctttattcacaaaccactgtaagtgatataaacactaatttctaaagacagatatacacattttctgggtttgcagattgcgtgatgtgtgtgttaagaagtcactatatgccacacataatattaattttccataattcataatagcaatagttatttagataaatgaaaacattccaaataaatactgtttaaaaaaaatccaaaatgtttgtttacatctctgacatacattttaaaatgacttattggcatcttggagtgcctagacaaaagattctgcaacatcggttggcactcactcactctaaatgattttattaaaactacatacagtcatgggggaaagtacagctcattgatgaaaatcaaaactgcaaatgaattttactttaaccaacacagtaagaattctatgtttgtgattcgaaacacaatacaaattctggattttgaaatctgaggcggcaattgggagaaatttattctccatagccccctgctcctactctttcttccctctggaggatgtcatagtgttttaataattcgtttcctttaagaacatcaaccaggcacccattgccataacactgttttccaggtgggggaatgagaatgtcttagtgatgctataaaacaccctcttgcccctcccctcacccacccaaagaagtctggtgaaaagaacactttatatgcttttggctgataagtagctcccccctcccccttttctcttttcaagatcactatcgtctgtcttaggtatcgaagctacagaaactttgttttcaaatcttgtgaaactttattgatggtttaatatccaactgatcttacggcatgcacataggatgg

SEQ ID NO: 481207 - DNA, 1000 bp, Homo Sapiens; identical to SEQ ID NO: 119910

SEQ ID NO: 481208 - DNA, 1000 bp, Homo Sapiens
ctgccacctgaacaaattttaaatggaaaatttcttttctagttccattccatgcttatagaacaatttttatagtaattttattagctcattaaaatgtatttgtgagggaatgcctgataataaaaaataatcattggcatcttgtgagagtgagactgaaatagcaacaagctgtcttaaatttagtgtcccacttcatttggtccctggtagcacagggacctaccagcacaacaaaccaaagaccccctccatctcaccccctctttgcacacctacagacatacacttactgtcccacaccaggacacagactgtcgacagtttggacattgggaggtcttcctcgcccagcaaagccactgatcagatcctgcatgaagaacctagtggtatcctttttcagggagacccatggggattagtctcaatttctctctctttccccaagagtaactctcccttcccacctctgtaaccagtcagaaaagaaatgcctgcgtgtgtctagctagactggcaactagtaaggatccaactttttttaagttttattttaagttttattttaagtttattttaagtattttattttaagtttttaagtttaagggccaacaacaatttatcaccttctcctcttcccacgagcactcccattctactccacacatgactgccaggacagataccctacctttctctttatgacctcctcccacattccacaggaaacctctcctacccaccaatgcacaccaactcataaatgcatcccaatattttacacacatcctcagactatcccctaaaattattctgtatttaatcaacagaggcaccaaacccataagcatagtgatatatttctcaattttctgattataattggttcttcagttacattttctcaatcacaactccaaatcctttcagagggaaaatgctctaatctcactcccaaattctaactccttttattcatttctctcacttc

SEQ ID NO: 481209 - DNA, 1000 bp, Homo Sapiens
aagcttcatgatgacgtgaccctgagtgcctggtgccgtctcctgattgttcctcatttcgtgtttgtctgcttgcacttctggatcctgactgcccatgggaggcatcagaccttccctgggatgtggtgtggctgtgatgggaacctgagtgtccagacctatttaccgattgctcgtggtgggatccctgccttcctcctctgcttgaccccgggtgtccacgaatggtgtcctgaccctcttgggacgctgaatgcctggagctgtctcgtgcctgctcgtggtgcgatccttgtcttcctccagtgctggtcccggtccgtccatgggcagagtcaggctgttcatgagtgctcacctggtagagggaagaccctgaacgtccagaccgttcccctgaccggccacgtgtggactcttggtggctctgctgtctcagcccagcctttccgtggcctgacactgattgtgtgtctgagttttctgaatgtccctcactgtcactggcctgactaccgctagacccccggtgtccacgatcgctgactgcagatgaagcttgcccgcgcccagtggctgagtgtctggagctgtctgctgactgctggtggccggatccatgtctttctcctggacttgatcttgcctgttcatgggatgatgcagtctgtccacgagaggaagtctctgcgtgacgagtgcctgattgtctggagctgtctgcagagtgcccatgactggctctgtcttcatcatgggacctggggtgtctggagccatctcttgactgctcccacgcagatccatgatggtttctggaagccgacccagagtgcctctcagagtcttctgagtgtccctcactgtccctgtcctggctaactctggatcccctacgctttcttgtcctggactcctgcaatggtacctggcttgtattttcatgtcttgacctgttcacttgagatgatgatttgccatcagatgaccttgatct

SEQ ID NO: 481210 - DNA, 1000 bp, Homo Sapiens
aagcttgctggaaacatcaaggagaaggggtcctggatattcttacaatgtgaacatgggtctcagattctagagtcccaaacactcagaaagagacaccaccagcagaaattgcaagctgattgttttattggtatactgaagttagagcatgatgccgtgtttcacggcatttgaaacactgttatcttcttattcacttcctgaaaaagacaagcaaacaaggaagattacagacaacacttgacatggcaggaaatgtctaatccctcactgggggttactgcagtgatggagatgcaagcccctactcttgccctctatcccttctacggcccccttctccttagtaatatttctttgttcactctttaagccattgcacataatgtgatttaaagtgttgcttagatgagaaagagaaacaattattgttatgtgttcatgctttgctgctgttggttatgtaagggctatttttacaaagatgggcactgcaacatatcatataatagtgagaatgtgaatcccgccttaatatccagtgacagggattggttaaatagattacggaacaaccaaacaatagaatagtatacaattgtaaaagcaagctagccagtaaacactgaagagatctaaatgaactcaggagaaagttttctaaacaataaatttttccagtgagtaagacacaaatctgaatatacagtatggtataagtgcttgtaataaaagcattatatatatttatgtagcaatatatatttcaaaaagtagattccaaagagtaaaaggtgggggttttgagaaggatagaagggaggaaagatgagttaggctcttactatttagctctgtacatttcggttcagtgagattagtttttgttagcttaagcatgtatgactttaaatgtaagtatactaaaaatgagataccattttacaactgaaagttcaaggaccacttagcaggaatactggacctgaaagcctga

SEQ ID NO: 481211 - DNA, 1000 bp, Homo Sapiens; identical to SEQ ID NO: 308164

SEQ ID NO: 481212 - DNA, 1000 bp, Homo Sapiens; identical to SEQ ID NO: 308165

SEQ ID NO: 481213 - DNA, 1000 bp, Homo Sapiens
gatctccttttcacattgaatggttttgccacttttgtcaaaaatcacttgaccataaatatgaaagttatttctggactttcaattttgcttcattgagctatacgtccatccttatgccagtaccacactgtctttattcctatagctttgtaatcaggaataaattttgaaattggtaactggaagtcctccaactttattttactttttcaacattgctaggttattctgcatccttttcatttccacatgacttttaggatcaacttgtcaaattctgcaaaaaaaaaaaaacaagccagttgaggtttcgataaagattgcattgactctttaggtcaattaggggagtactgccattttgctaacattgagttttccaaaccatgaacatgggatgccactccatttatttagatctttaaatttttaaaggaatgatttatagtttgtttgtttgcttgtttgtttgtttttttgaggcagagtctcactctattgcccaggctggagtgcagcggcgtgatctcggctcactgcaagctccgcctcccaggttcatgccattctcctgcctcagcctcccgagtagctgggactacaggcgcctgccactacgcccggctaatttttttgtatttttagtagagacggggtttcaccgtgttagccaggatggtctcgatctcctgacctcatgatccgcccacctcggcctcccaaagtgctaggattacaggcgtgagccatcacgccgccagccaagatttatagtttttattgtacaactcttgtatttttgttaaatttattactttttttaattgaatttcttctttttttttttttgagatagcctctctctgttacccaagctggagtgcagtggtgcgatcgtggctcactgcaaccttcacttcccaggttcaagcaattctcctgcctcagcctcccaagtagctaggattacaggcacccgccaccatgcccagctgat

SEQ ID NO: 481214 - DNA, 1000 bp, Homo Sapiens; identical to SEQ ID NO: 308166

SEQ ID NO: 481215 - DNA, 1000 bp, Homo Sapiens
aattcccatagacttattgccagctttaataattgtcaattcgtgctaatcttattccctctctacctgaacctacttcttctttattggattgcttttaacactttccagacgtcttattatttcacctcccaaatttgtaggaagtacatatcgctaagtaataatgaccttttaaaatatagatctaaatatatagccacattatcattctaagatatcttttggtgaatgttaattcttttttttttttttttttttttgagacggagtctcactctgtcgcccaggctggagtgcagtggcgctatatctccgctcactgcaagctccgcctcctgggttcacgccattctcctgcctcagcctcccgagtagctgggactacaggcgcccgccaccacgcctggctaatttttttgtgtatttttagtagagacagggtttcaccgtgttagccaggatggtcttgatctcctgaccttgtgatctgcccacctcggcctcccaaagtgctgggattacaggcttgagccaccgcgcccggccattaattcttttttttgggagacagagtctcgctctgtcacccaggctggagtgcagtggcgtgatctcggctcactgtagcctcgacctccagggctcaagtgatcttcccacctcagccccccaagtagctcagactacaggtgtgtgccaccacgctcggctaatttttaattttttttgtagagagagtgtctctctatgttgctcaggccggtctacacctcctgacctcaagcaatcctcctgccttggccccacaaagtgctgggattacagggatgagccactgtggcaagttcttaatttttttttttttccccttgagacagagtcttgctctgtccttgttgcccaggctggagtgcagtggcccaatcaaatcatgactcaccatagcctcaacctcctgggctcaggtgatcctcctatctcagcctcccaagtagct

SEQ ID NO: 481216 - DNA, 1000 bp, Homo Sapiens; identical to SEQ ID NO: 119912

SEQ ID NO: 481217 - DNA, 1000 bp, Homo Sapiens; identical to SEQ ID NO: 308168

SEQ ID NO: 481218 - DNA, 1000 bp, Homo Sapiens; identical to SEQ ID NO: 308169

SEQ ID NO: 481219 - DNA, 1000 bp, Homo Sapiens; identical to SEQ ID NO: 119913

SEQ ID NO: 481220 - DNA, 1000 bp, Homo Sapiens; identical to SEQ ID NO: 308171

SEQ ID NO: 481221 - DNA, 1000 bp, Homo Sapiens; identical to SEQ ID NO: 308172

SEQ ID NO: 481222 - DNA, 1000 bp, Homo Sapiens
gatccactgaaatgggagttcagggggtgggcagcagaacagggctgaggttaggcgcaggggagtggtgtgggacctgctggtggatcagccccgagtttgctgggagggagcagcttatctaaaagagtggagttggctttagagaatttgcttatggaaatttttttctttcagcctgtcttaatgtgacctcttatttgtgtgaaaaatggcatgaggtttccctgctgtgggagaatgtggatactttgtagtttactttctcgatattttttttctgagatcttccccttgttgttaatactaattttgtgctctcacaagcaccctccccaagcccttatactgcgctctgcccctcacttagggcctgagctatggaattggccctagggcagcaggaacctattgtttcagaagtcggtgacctttgaggacgtggctgtgtacttcacccaggcggaatgggatggcctgtcccctgcacagaggaccctgtacagggatgtgatgctggagaattatgggaatgtggcctccctgggtaagacctctctaccctgggaacctggaatctgccaattggggttcctggcttgcttctcccttacaggttactgaggggatctctggtaatcctttactgagtgagaaccccagagctgttcctaatctagacttagaggttactggcaggggcaaatgccaagccttttgtaggcctatataggactttgcttggaactggtatgcactgttgatccaacccatgaaagctatgttttggaaacactggaatccagttgcttcctgttccacagtggcatcttcagttgccccctcatcttacctgtcttgagtcttttcaaggatctcagtgtactctggattatttcaggccaaggtcaaaaagtggtatccctttgggcagaatctccctgcttgccctgcatgaggtctcctaggcctacagtctgggccctaaccaggctctccc

SEQ ID NO: 481223 - DNA, 1000 bp, Homo Sapiens
tttttttttttttttttcctcttaatatttaattgaaccactcagtcggtactgaaacagttgttagggaggcctgtgttagtgagacctggcctgccacgtatggatgctcatgatagtttcttcataatagcccaaacgtggaatgatagaaatgtccaataataagtgaaagtacaaacatacatggtatagccacacgaaggaatactactcagtatttacaagacattacagatggattttaaaattacattgatgcatgaaagaaggcagacacaaaagaacacaggtatcatttcatttatagaaaatggttaaaaatgcaaacggacctgaagtgacagtggctccttggggctgagggttgaaaggctgatgaactgcaaaggggtacaagaaactttggggcataggggatttcctctatcttgggttgtggcagtagttccgttagtgtatccatttgtaaacgtgcattgaattacacattttaaagtggtgcagtctgttgtaccgaaattatgcctttataaagttgatttcatcatcttaatttctccatactagcaattagcagctagaaaatgaaattcaataaaacataatagrgattaacagccagaatcattacatgcttaacaatacatgcaatgaagcaggtacaaggcccctaaaagcaattggtgagaaaaattaaagaaggctaaataaatatatatcatgttcattgcttggaagactcaattttgttagcatattacatcaacacaattctgcttaatatttctagtaggagattttagagaaatttgaaagctagtttcaaaatgtatttgaaaatcaaagaacctagaataagccaagtcggtattgaagaagcaataagttggrggacttactctgctagatttcaaacctgattttaaagctacagtaattttaaaacagtagtaatggtgtcagtattcataaatacatcaaagtgaaagaatacaga

SEQ ID NO: 481224 - DNA, 1000 bp, Homo Sapiens; identical to SEQ ID NO: 308173

SEQ ID NO: 481225 - DNA, 1000 bp, Homo Sapiens
tctagaacattccaatagaacgttctaggacattggagacaggcagcaactcagctgctgggtgtggtagctcacgcttgtaagcccagtactttgggagaccgaaatgggtggatcacttgaggccaggagtttgagaccagcctgggcaagagctagactctgtctacaaaaatagagacagggagcaactgctacaaaccctgcctgtcccactctcaccttcaatgtatatcgagaagggacaggtgggtggaatggtgtccaagcagccgtctggcaagtcctcattttcagaaagttcccagtagcactgaaatctgaatctaaacacttaatccaatttggggtcagtgtggacatcccccatccaaccccctattctgtcctgggagaagcagaagtgttgggtgtcttaaggccacagtgggtaaatggatgacacacttcagtctggatacccaaagcccatctgtgtcctaggaacacttcgttttttacattttatttatttatttgagacagggtgtcactgtgttgcccaggctggagtgcagtcgcgtgatcacaactctgtagcctcaacctcctgggctcaagcaatcctcctgcctcagcctcccaagtagctgggactacgagtgcacacttggctaatttttcattttgttgtagagatggggtctcgctatgtggcatgaattcgttcaccttcccagagttcattcccccaccctttttttttaagagatgggggtctcgctatgctgcccaggctggtcaaaaactcctggactcaagcggtcctcccgcattggcctcccaaaatgctgcgattacaggagtgagccacagtgcccgaccctcattacctttttagaaagcacctcctgacgttggcagtgacatttatttttctgggggaggggagttatatacagcagtgacccggagcccctcacccccaccaggcttaggtggggacaggaggcgttggcag

SEQ ID NO: 481226 - DNA, 1000 bp, Homo Sapiens
aaaaaccggacgcgccctcccccgcccggcaactgagcgccgcgtccaaccgcgggaaaacgtcacttccgcccgcggcgtcacgtccgcgaggctcccgggcccgccggcgtctgtggggaactggggcgctggtcggtgcgcgggctgggacgctaagtcatgaggaattaaactgggaaacctggcgtgggtccaggcgccttccaggaggcatccggcgcggcccggacgtgcttctacccagaaccaccccctccaggccggggtgcacttaacggggctatacaaagagtctggtgggtgactgtgggcctcatccctatcccggggtctgatagggaagactctcgggcccgcagggaatatctggctagtgcaccctcggcgggagcgccactctccctccttggcggcgccccccacctctcatcccgcccaatccgttttgcaaagtcggccaaaacaaaaacaaacttggagcgctgataggtgcggaactttaccagtcacttagaagatagaaaatgttagacacttgctggccttttgggatcactggttagggaaaggaagggagggagctgtggggaatgaacggatagtagtgtaataaaggattgtagtggtgtaagaacgggaagcaccgtggaaacgtctgaggaagattttcaggggagcagtagctgctgaatagaagtctgtcaggcaggcctgacatttactatgtaccaggaactgtgctggccaccttacataattgtcttatttaatccccagaaacagccttttttttctttttctttctttcttttttttttttttttttttactttaagttccgggatacaagtgcagaacgtgtaggtttgttacataggcatacgtatgccatggaggtttgctgcacctatcaacccgtcatctaggttttaagccttgcatgcattagctaagaaacaacgctttccaatgggtagtattagctagtctacgttgc

SEQ ID NO: 481227 - DNA, 1000 bp, Homo Sapiens
gaattccaatatgcatggtatgcggatggacttttaagaagtggataggccagagcaagctttgttgtaatcactctcatctcaaccacccaggcatcagctgtggaaatagcagacacagtaagacagcacaatagtggaaacatgtttatttttattatttagggttccaaagactggggtaggtaaaactattgaagattaacaaggcaaactcagcagagaagagagtgtccaggttgagttgagttggagagatggtccggtttaatttttgactccgttgtaattgctggatcagttctagacatgtattttccagctgcctctagtttttgaacttgcagacaaaggagaacttgtcttcacaaggcacatccttccatttctggaatcctataagtcaatgagaagagttacaactgggagacccgaaagagtatgaccctcctggctttaggactcaggacaaaaaccaaacatccatttccttaatgaggagttcacctttcctctatcccagtcccagttccatccctggagctaagcaggagagaacagaaacaggtggatggattctctgcctctcacctgtgcttgaggtcaggctcacacagtagccaggattaacactgcttggggctccaatgccccaggacttgtaggagaccagggacccactgctccagtgccagcggcggttctagatggggaagggccagaacagaggcagtggtcactcaaaaatacatggaatcactgggcctgtgtgcacactcagaaacatgctaagacacaaaggaagaataaaccttgctaaatattgtttcctttcctttgctattgctctaaacttctttcctgaactgtccaactcattaactgtattccaccaagaaataagtgttatgaatttgacagagacccaaagtatctcacttaaaaagtggttcctgattttttgtctttgtggcccaggaccctcatatccagcatagca

SEQ ID NO: 481228 - DNA, 291 bp, Homo Sapiens
ctctccttccactccccatctcttctcccctcctgtccccccacctcagcccttggagtcccagtccccacctgttgtagtagaaagagaagacgtcctcttttagcaccccttgggagatgatgttgtcgaagataggggtgaccctgccaatggcctgttcaatgaagcccatgcccacaaccccatcaaactcggccagcatgaagggtaaggcgggcatctccgtgacctctccaaacatctgtgtcaccgtgattccacccacctgtgggaggaaggaccagagga

SEQ ID NO: 481229 - DNA, 204 bp, Homo Sapiens
ggaggggccccagggttgaggatttctgaccccttcatttgaatctgccagacaccagtcttgatgaggttgatatagtggaaattcccttcgtaatgctgggggtcgctgcctcccagcacaatctgtcctcccagcgattgggaattcctaaaggaaagatcagaagctcttggaaacccataacctccaggacccagcaag

SEQ ID NO: 481230 - DNA, 1000 bp, Homo Sapiens; identical to SEQ ID NO: 119914

SEQ ID NO: 481231 - DNA, 1000 bp, Homo Sapiens; identical to SEQ ID NO: 308175

SEQ ID NO: 481232 - DNA, 1000 bp, Homo Sapiens
ttttttttttttttttttttgaataataaagctcatagcagtttattaagtcccacatttatataacaaacctcaggtaacagtctgtcacctggctatctgcaggccatttttcctcccaccaggccaagtttggaaatgacctaccatctgtgacagctcaaactttagtctacttttggtatgcggctttgtaaaatgattgttttactatggattgttggtaatgcaaggacacctatatcttgatgcatttatttgaagaaaagaaattcttaccttgcctcctgcacgtagtatgccaaaaacaaatcaagctccttaactgatactgtgatatgatgtggctggacacaaagtgctgggtttgtgcaatgtggggatttcatgagccgctctccatcggtactttccaaggggatgcctttgaacaggatcaccatgactagatccagacgccagactttgtctgcctgtcgcaggcagtcgattctcctaatcttacccttctggtcgggattggataagacacagcacgggtgcttcttgccagtcacggtgagcacaaagtcctctcgatactcctggcgaatatctttgcgcagtttggcaaggagcctggatgcccacttctgtttgatttcgggcttttcactgagaagctcatctttgactgctctttcttcatcctttgacattcgcttctcatgctttttaaagtacttgcgttttcgagcctgcaggttgaaccaagtataggcaattgcacggacatgtggaagaagtgcctcgatgaatgggtgaaattcatcctgagtgagacagatgggagaatacatcatgacttcgccttaaaaggcactttccgggagatgcccaagaaaatcttcgagaagcaagaatttcatctattcattttacagtcatctgagccccgcgatgcgatcaatcaggacggggctctgcgctggatcaccgcaacttcacaacaaacccaatc

SEQ ID NO: 481233 - DNA, 1000 bp, Homo Sapiens
gatcacatcattgcactccagcctgggtgacagagtgagactttgtctcaaaaaaaaaaaaaaaaaaaagaatgaaagaaaggaaggaaggagattaaaacagtcttaagacacatcaaccagttgcagcaggggtccttcattgaatcatgattccaaaaaaagtgacacttgtgagataattggaaatttgaatactgaccaggttagttagctagggcaaagtaccataaactgagtggtttcttagaataacaaaaacttattttctccccattctggggctagaagttagatatcagctgttggcagggccacgcttcctggaaaggcgcttgggaaggtccctccttgcctcccccagcttctggtggccacagactttccctagcgtgtggcagcatcgtttctcatgtggcgttctccctgtgtcactttgctagtcttccctctgtgcgtgtctgtttctgtctaaatttccctttttgataaggacactaatcatgttgcatcagggcccaccctaatgacctcatttaagcttggttacctctgtatggaccctttctccaaataaggtcacattctgaggtccggggagtgggactgcagcatagctttctgttggggggtggggacacaacttaacccattacactagatttctgagactgtcaaggagatggcactaattttctaaggtgtcataatggtattatggttatgtttaaaaagtttctgttttcttttagataaacatccaaaagacttacaaatgaaatgttatgatatatacagtttgctgtagaatgatacgggggcgggcaaatgtgcagcagtaatagacgaagtgaccctggctcatgtccataattgttgaacccaggggtatatggggtcagtatattattctgtttactttcataaaagtttgatgttttttataataaaggtaaaacaaaaagagaaaaacgaatagcaagcaacaaaaacaagaaac

SEQ ID NO: 481234 - DNA, 1000 bp, Homo Sapiens; identical to SEQ ID NO: 308178

SEQ ID NO: 481235 - DNA, 1000 bp, Homo Sapiens; identical to SEQ ID NO: 308180

SEQ ID NO: 481236 - DNA, 1000 bp, Homo Sapiens
gaattcggcaaatgaaacttcaccaggggctgacttagcccagcgagccacaggcatgggttaccggagcagaatgtgcctctgggtctggggcgctttctactctaactgcccgaggcagctgcagtaataatggtggtgctgatagggcctttctatggagctcttaagagggtttaatgacaggagcgaacacttggccatgagcttagaacagtacctgcatgcagtaagcaccacagaacggtgttagaatacacagctcaggtacagccttggcaggctcttcccacctccccacctcatcagcccacactgccgggtacgtcgcagtcccctaaggacagctgtgtggggctggccctgcagaggccagccaagaacaggatggtaaatgcgaaagttctggatgcccagcttcataaggacaggttagaaaaactaaatcaaactcctttgacgaaaccagatcctactgtctctgccttgaggtagattcttacaagagcaggaggctaacaaagcatcccctgctgcggattgtcaaaggacagtgaggctccatcccacaggaaggatgagcagccaggctacctggcctcagcccatccagggacaccgggcatgcatggatggagccacggatgagccagtgccgctcacccctgccccagcctctgcacgccacacatccacgtttatgcttgtgtttttccaaaagaaagatttcggtgcctgtctgcagcagaatgtagtttgaatttgcaaaggtcttttaaaactcttttcgtatgaacaatcaaagtaaaagatagctttgcagagagctaattgtttaccggccgtccaccaccaacagcagtctgattaaacaccagactcctgggtgctcagctcccagtcctgggcagccaaacccaccttccttaagtggtagccaggcaacctgccagctcgcttttcatatgcaaactgccccaagactgttaaaagtcgctgt

SEQ ID NO: 481237 - DNA, 1000 bp, Homo Sapiens
gaaacaggataccaatgcacatccctcagcacatccatgtgttcaccagccaggaagctgaccaaaacctgtgtcagaagtttttatatctagagttttaccatagatataattggttaaaatcatcggcatgtggctgaactcaatctctagcccctctcccctccctggggatcaagctggtatcatccagctcaaagtcccagccctgtaactatatggttggtcattctggcatggtcagcctccatcctcagtcaaatcttacagcaaactcaggtgtggtctgagatcaaattcaatataaaattaggtgcagcctaaggtcaaatctcaacataaattcaggtgtagtttcagggacctgccacgaaaaacaaagatactcctattacttgggaaattccaaggatttagagtctccttctcaggaactgaagacaaaggccaaattctttattatacaatgaagtaggggaggatttatatgaaaaatcttactaattctggaagctggaaatgacctgtgtcccaggagataggaagtagaccatgtgttcctcattaaggtggtctcaagacctgctctgctcccaacttggttcactttcccagcccttaccaaaggggcacccagtcaaccattcagcagacataaaaaatgagttggataccaggttcccatctgccccatcacctgtttctcacggtgtccagagtatcatataagacccctaacagacacttaacagagaccctgcaggtttggtaaggcaattggagatctgctacatccagccaggcagcagcactttgggaggccaagacaggtggattacttgaagtcaggagtttgagaccagcctggccaacatggtgaaacactgtctttaataaaaatacaaaaattagccaggcgtggtggcacatgcctgtaattccagctatacaggaggctgaggcaggagaatcacttgaaccgggaaagcagatgttgcag

SEQ ID NO: 481238 - DNA, 1000 bp, Homo Sapiens; identical to SEQ ID NO: 308181

SEQ ID NO: 481239 - DNA, 255 bp, Homo Sapiens
gggacggagagaaagaaccccagctcagatcatacgcatgatttagactgcaaagcaggactgcttcatggcatgtggcatcagttgcaccaggcccatgctgggctaatgccccactggtgagttttgaaattcttaatactttttgaacaagaagccctgaatttttattttcactgggcactgcatatgatctagccagtcctgctgcagagcttaacatatgtctgaataataacagaagaggtcaatggg

SEQ ID NO: 481240 - DNA, 1000 bp, Homo Sapiens
catccaatagtctgagctatatatatggtggagaatgtgatagaaatattttccacaatcacaggcatatcatccagcgatttatatcgatcagttaaacaaaccaaatatttttagatatttaaaagtactatgaaggcaataatgtgtgtaatagtgaatgacagggatagaaatcaggctaaattagatatggtgatccgacaagcctctcttgatattttgggtgggatacgagtaatgaaagaagccagtcagaagatcaagtcgggaagaacactgggaagagaaaacagaaaatccctgagagagagcaaccttcatgtgcttgcaaacagaaagaagaccaggttggaaggagtacagaaaatgagcaagatcagataaataagagacttaaaggccatgataagcctttgagttttattctaagtgaaatgggaagccattgaaggatatcaagaagagggatattatttgatttgtgtttcattgacattctgactgtagggtagagagtggattgttgttgttcagtgtgaatgcaggatacctgctaagagttcagggagaggttatagtagccaagacaaggttaatgcaagagggggtaaaaagaatgggcaaattctagatacgttctgaagatagaacctgtccatgcattagatgtaagcttttttgagcagggggtggggacaggttctctctctgtcacccaggctggagtgcagtggtgctatcacagctcactgcagcttccacctcccgggctcaagccatcctcccaactcagcctcttaagtggctggaattacaggtgtatgccaccatgcctggcctagatatgggccttgtttatttttacctctggagaagtttagattttattttaggatctggtctccagatctggcatccactgagccatacgtcagtctttggttggtccacatacatttagggaagaaatgattgaaggggggttcagtccagttga

SEQ ID NO: 481241 - DNA, 1000 bp, Homo Sapiens
  misc_feature (28)..(28): n is a, c, g, or t
  misc_feature (182)..(182): n is a, c, g, or t
  misc_feature (196)..(196): n is a, c, g, or t
  misc_feature (926)..(926): n is a, c, g, or t
ctgcaattcccacaacaccccacggtangggcgggacccaacatggccgcttgtctggggacaggagcggaggccaatacgcgcagagcatgcgcctatgccgggccaattgaaagccatagtgacagtaaccctgattcaggggcgggaaacactgaccacagaacacaacttgaggtganaatccccttacaanggggtttggggcataaatcgcacaatctttggctttttctaactagaaaaagaaacatgattcttttcacgtgtaacgaaaggctgtaccgcacttttgcttttttctttcctcccaaaacgcgtttaactatcccttcacgacttcccactggctggatttcttttcgtttcatttccccactctggatctttctggattccttaagccttcttttctttatgtgtctctcagaaacacagacttgcagtccctggcttgatccatcaaataatgtggtcatttacgactacgctcagccctccctggcatcctaacaaaattgcaccacatgcgccccttctcttttcctttctgtcttttctgtgctgtttttctccttagcatttgtcgttacgaagcattgtataaaatttacgtatttatcttttttaccatcttactttctcactagaatgcaagatccctgcagatgtggatttttgttttggtcactgtagtctttctagcacctagaaaagtgcccagcacatagtaaatacaccgtattttcaataattgaacgaaatctagagtgacctttctcccctagtctccctttctctggtgcagatcaacccgtttctgaccaccatggttccttgtgcttgttcccctgtttaatccaaaatcattattgatgtattctgtgccaaatgccatgtgggtgctggagaaatcattgattcanacccaattcctaacctcaaaatgctctgtctagtgacgtatgaaaagtaaaattaattttacaataaatgcaat

SEQ ID NO: 481242 - DNA, 1000 bp, Homo Sapiens
tcttaaggtcgatttcaaatggaataccttaagattttagggtctcaggcttgtatgtctgcgacaacgttctgcaggaaatactggtcatttttaatatggttcattcagcagcattatttcataaaacagatgccatttccattaataaaaatattcagctggtttaaatacttaatctaatggtaattgttattgtttctactggcaactacaaacattttccatctcattctatcatagcccatgttttaaaacttattttttcctagtctccaagaacatgctagctttaaatgttagggcattttataatttctactttcctattttcactgaagggacttgaaagcacacaaattcaccctgtcaatatatgagctaacattatttgtgtcactttccttcatggtgttcagcttttcctttgaaaactcccattaacatttcttcttgttagctaggaaatgagtaggcagaagtgtcagctatctgaaacagatgcgtttggctgaattggaattttcctcaattcctaatccaagagcccttatgctttgagaagaaattatactacataaaaataaggttttatgaaatttccaggttggtttttctgcagtgtggatgtttagagacgataattcagtaaataagtcttagtttgtattgatatgaactaatcacttataaagagtgattagttataataggggcttacatttaatgagtaattattttgtgcaaaatgctattccaagtggctttatacacatctcatttatatttccattttagagaagagaaatcagagacatgaaaagaattaagatattttcacaagattctacaactattaagctaaaggacctgggatttgaatccaatctttctgagtccagcatttaaccacttaaccccctttctaaacttctattagagcctcatgtggattgtcactgttttggtggatgataaaactttgtatatgcactcaatt

SEQ ID NO: 481243 - DNA, 1000 bp, Homo Sapiens
ctcttttaattgtcatttttatagctccccaccgcagctgccccccacccttcccttcgatgacaacgtttgcaggcttcagggggaccagggaacaaagctggggcctggcagccccactacgctgccagccggggagaacaagtcacaattacaaattatcacaacaattagcgcctgtacttgggggatctgcaaattgaggaggccccagctcctcattgtacacgggtctatttggcagtgaccttgctctggagacgatgatattccttcagcctgtaaaccagattcaaaacaaagaaaaatgtaaattaacaataacaacacacactgggttcaattaattcaggcagagctggggtggctggggcagctgtttgttaagatgtgtgtgaagttgcctttttttctattccctctcccgccctggcccctcctgccctccaatcaggataatgtaattaatttatcttagggggaaaacattgtttgtcattgttgaagacaaagcgtttaactggcaataggagaaatgaagaggccactatgtaagccctgtttgttctgggccatttaaaagggtttatagagtcataaaatacaaacagagggcgcaggaggcaggggaggtggaggtgacggaggggaagggagaggaccctgggcagatgggcgggcttcaacatctctcggggcatgaggtgcctccagggacaagagactggctctgggagaaaatgatggctctgtgcccagggcatgttgttagcaagaggagactgacttgcatcttcttctagactccaatccccatgagaagggagctggtgatggagaacccacagcaggacaggccctccggactcagctccaccacctcctagctgtgtgacccttggaaagttacttaaccactcagcctgttcccggggagttgcaaattttgtgtaagaattaaatgagacatcctaggagagtgtcccagagcagcttagtc

SEQ ID NO: 481244 - DNA, 1000 bp, Homo Sapiens
taccgggccccccctcgaaggatcaggcccttatggccggatccagcgctggagagtttttttttttttttcaagtttaaaagtcagaatatatttcactgaaaatatgtgtatgtgtgtgccttcaagagtgagtgctcctcaagggagactcacacagttccttacaacataaataagaaatagacgtaatggcttcactcagtagaaaactagcagcatcattctgggccatggggcattccccaggggtcaccatccagcagcctctccctgggggcagaggacgcctggtcagaacagctataactcatccatcatggcgagcaaatcgtcccctttgccggtgctcagccttggctgctccgtgatctcaaactcccccatgattcgagccagctcctcgctccgttgctggtcctgggtggcttgtatgttgataacttcataggataactcttctggcctggttagcgctgcttgttcctcttcttcatcggtggtaaagagattcaaccggaatccgggctcagggccactgggtttcttaatctccatccctcccatcagcctggccaagaaattcagctcttctttagcaagagggtttggagcaatgctttcctgggtccatgaggctaagttctttgatgatccagacacatgagtttccacaggctgattcacgctgtacatgttagttcccagtttcaggactcggtctccataaagttcaaaagaaccttctttgggtgcagggacatagtttccaccatgcttgaattctatcctcttcacttcttcacctttgttgttgaacattctgatgagtcctggaacttcagttccccaaggaacaggcccggacaccggcaacacaaagcgaccgttattattctgaactttgtcctttagaaacatggatactcggatgtgcaggtcttggaagaagatgaggagtgtctgccggatcagctggaactcccctgcagagagacca

SEQ ID NO: 481245 - DNA, 1000 bp, Homo Sapiens; identical to SEQ ID NO: 308184

SEQ ID NO: 481246 - DNA, 1000 bp, Homo Sapiens; identical to SEQ ID NO: 308185

SEQ ID NO: 481247 - DNA, 1000 bp, Homo Sapiens; identical to SEQ ID NO: 308186

SEQ ID NO: 481248 - DNA, 1000 bp, Homo Sapiens
actgagaaagtaatttatttaattgtaaattgggacattttttaaaaagtttagtaataacgattaacaagattatgaatttgtccattggggatttaaactttaatgaagttttttaaaaaaatcaagaaattcctttaaaagtaaacattagtcctttgctctaaactttcaggctagatcatttctttgggtcaggacttaaaaacccttaagctctgcctactccagactgaatccaagacaacctgactaatagagaagcaggagtcttaactgatgtgtgatctactttttcaaagccctgctttttccttttcaaagcccactaattcagggtttttgttttgttttgttggatgtgagattttctggcaaaaaatgaagtaggaggcacggtgaaatggtcgagaaaaatttaagtttcattttatcaaagaagctcattgcagtatacatcaggctagtgcaatggctcttcaaataaattgcttgaaaatggaaacaaatgaccgagactggaacacaagcaaaacataaatatacgtgcataggtacacactgtctcctaactccctttacattgatttggttaactttaaataatatgtaggatttcacagcttctcttagagaagggaattgaatgttaagctgttcagtcatgataactagatcttccattgttatggctcatgcttctgttaccaaatcaattagccattttgccaagtatgtctaattattacacttctatagtgcagatggagcaggagagaacaagaggttacttgatgggagggctgtttctccagtctactccttgatgtcagtcctccaagttggggtatgatgggctgaggaaccctgaggtttagactagctaagtggtgaccgagtgtcttctgatgaagcccacatcctagaaacagaactgcttgcaagcctcttcaatccactgcaggcctttgccttctctgacaccatccacatctcttta

SEQ ID NO: 481249 - DNA, 1000 bp, Homo Sapiens
gaattctgtttgtgttgagttgaaaagtatattaaaatagggaaaggggctgggtgcagtggctcttgcctgtaatcccagcactttgggaggcccaagcaggcagatcacctgaggtcgggagtttgaaaccagtctgaccaacatgaagaaaccctgtctctactaaaaatacaaaattagctgggcatggtgacacatgctgtaatccagctactcaggaggctgaggcaggagaattgcttgaacctgggaggcagaggttgtgtgagccgagattgcgcattgcactccagcctggcacaaagcgagcccgtctcaaaaaaaaaaaagagatgtacatatggtatattcagctcttgacattctaaacaaagatgataatttaggagaggttacagaatagagtaggagatctacaagagaagagaacttaacatttttataaagtatggggacagagtcatcagagaggagaaattagaaaggtatagtgagatctagtaggagataagggtgcaggtaaaggaattaacccagaaaagagaaaggataccttttcctctgagactagaagggaacaggtaagatggttttatgtataacttgtaaatctagagcaggaagttgagggaattcgaattcatagctaatagttttagtttttattttttttctgataaaggagtcataaaagagataagggtagagctgaagtagcaagtttgagttgaagtaagatggtacaaaatatatgctctaggtaatgggagagggaattaatgagggaggaaggttgttagcagaagagggtgatgtacctgagaacctaggctggataggaaaagacacaaagcatgtgggagattgtagtttgaagaaatgagattgtagtttgaagaaatgaggaatgggtatcaaaattaggtaagaaagcaggtatttagggagtaatggagtaaaactgcaaggatagtagttgtagtcagagatcaatata

SEQ ID NO: 481250 - DNA, 1000 bp, Homo Sapiens; identical to SEQ ID NO: 308187

SEQ ID NO: 481251 - DNA, 1000 bp, Homo Sapiens; identical to SEQ ID NO: 308188

SEQ ID NO: 481252 - DNA, 1000 bp, Homo Sapiens; identical to SEQ ID NO: 119916

SEQ ID NO: 481253 - DNA, 1000 bp, Homo Sapiens; identical to SEQ ID NO: 308190

SEQ ID NO: 481254 - DNA, 1000 bp, Homo Sapiens; identical to SEQ ID NO: 308192

SEQ ID NO: 481255 - DNA, 1000 bp, Homo Sapiens
ctgagacatttgggtctccatagtcatcccagcactgtgccaacgtccagtgggttttaagagacaagcttagaaaagaggaaggaaatggtttcatcttcttgtgcagctgtcgtcagtcctcaattctgtttctgctaaccaatcaggaacaattccagttaggagttgagtctgctttatagataagtctattacacaccagcttgtgtccttgtgaaaaccccggggaggggttactgttctgctggccggtatacccctccttagagtattctttttctgtttaagataattcctggtcggccgggcgcggtggctcaagcctgtaatctcagcactttgggaggccaaggcgggtggatcacgaggtcaggagatcgagaccatcctggctaacacggtgaaaccccgtctctactaataatacaaaaaaaatttagccgggcgcggtggcaggtagtcccagctactcgggaggctgaggcagagaatggcgtgaacccggaggcagagcttgcagtgagcccagatagcgccactgtactccagcttgggcgaaagagcgagactccgtctcaaaaaaaaaaaaaaaaaaaaaaaaaaaggataattcctggttaaaatcttatccaaaggcattagagcagtttgcttccaacaggagccaaaaatgaccagcaatgcagcctgacggagaagaggggagaagagcctgggaagaagataatgtccagctattttttatacccataggacagaaacttaaagtagaaaattaccttgtttttcacaatattttctcctactgaaattttcttttcttgaaacgggaaccttttctcccactgaaactgcaagtaggttttccctctatgttttccattacagaaattgtaaggaactacccatgcggagcaggtggtttggacacatatttatatctttcaaaatggaacacaaataatggggttataaattggcaaacatttttgaaggg

SEQ ID NO: 481256 - DNA, 1000 bp, Homo Sapiens
accttaagatttcaagcagcaaataggtaaaatagtaatgaaaattgggcacaaatacaactgaattttttatctaggcttctgtcccattgaggagtagatgtttttaggagctgataaatggaaaacaaggacgctttcattacaagaagagtaattcagtacagttttcctgttgcctcaagaatcctcccgtaatttggacggaattttaggacgtggcactcaatgaggtaaatcagccaccccaagcactgaagacagcacatcatgcctcctttgcccagaaggctcagcctgcttggcagtctagctgacagcacaagggtcccacatgtatttcccctgctgaaagcagctagttagacacagaacgaactcaaggcatattggtctcataaaaaagattgattcgatcaggacatttccccctagttcctttttaaagaaagtcttggcttaaaatatttaatttttttttcctatgagtctttaaacggaattgtgaatagcagcaatcctcgtaactctgatgtgggcagagaacactgaaaatagtagatagcagatgccaggccccctcagaattgctcatgcctatttatatagatgctgccttccaattttttctcagatcttccaagttctatcacagccatgacaaagtaatgactcatacttaaatgcagtcatcaatgtcatatttggtattagtacctttgtagcattgctttgtgtcagagcatttaagaggaaaaagtccccaagagcaggagcagtctgccaccatcctcagggaccacaaagggcagggcctgcagaaggcaatgctcattgtgcaggaaagcctgaggcctcctgcaagctgttcagataagcagctgtaggagggagggggaggagggccgaggagggggaggggaggcacaggtcactgttatcgccttggaaggcaagacttcagctgctgcactgtcttatctcaagtatgctcctgttt

SEQ ID NO: 481257 - DNA, 1000 bp, Homo Sapiens; identical to SEQ ID NO: 308194

SEQ ID NO: 481258 - DNA, 1000 bp, Homo Sapiens; identical to SEQ ID NO: 308195

SEQ ID NO: 481259 - DNA, 1000 bp, Homo Sapiens
cggcccggggggcgggggcgggggccgggccaggccgggtcggggtcggggtccgggtggaggtcggaagggaggttcgagcgccaggctccgaggacccgaggccagctctgagcgcccgagagtccgcccgccccgtcgcggccgcactcagcccgggtgcaacgcaagtgcagccagcccggcccgcgcgccttttaacgcgcaggaccccgcggaggggggcggggcggggcgagctccgaagggcggggcctaggaggccagacaccgcccaaagccgccccgacccccaccccgaagggtccccgccgccgtcttagggctcagaggtgtggagctgggatgcgcgggaccctatccccggagtccctatcctgccccaatccggaccagaccttcggtctctacacagcgtccgaggccagagggtcccgacccttttcccgggcctccccacctgcggccccgcggaagggaggggaggcaggcctggcggcgctcgtgtgaagaagttaattcaattcgctctgataaccgagttattccgatctggcccctcagccccgcccccagcgaggtcccatcccggcggagactgcggaggcggcccaggaagggggatggagaccgggaagagacggaacctgggatggggacagggaagggacgtggatagacagaggaaacagagaccgggagagaaaggggcagaaacagtgatggagacagggacaagagatacaggtacacagagggagacaaggacggaacatacacagcgaaagacaggatggagcggggacaggtcagagacaggagatgagggtaagagagagacaggatggagcggggacagggcagagacaggagatgaggttaagagagagacaagaggagacagggagacagggggacgagaaagagaggagggaggcatggagacagaaggggtcgggatgagacatggacggcaaccaggactgcggtggagagcaag

SEQ ID NO: 481260 - DNA, 1000 bp, Homo Sapiens; identical to SEQ ID NO: 308197

SEQ ID NO: 481261 - DNA, 1000 bp, Homo Sapiens
ttttttttttttttttttttttttttttttttttttttttttttttttttttttgccggcccctccaggtttattagtgttgcatcagcaccttgaaatagtccacacggtcacatacgtgacattagaatccgttccccaaaaagctatttacattaatccagggtttcattaaaaaaaactagcaacacatacatcctagaaaccaaacaatgcacaatgaaccgcatgggggtctgcagaaactacagtgggcttctttggcccacagggtcagattccaaggtgcccacaagcccagctctcatcccctacaggcaacacccgcggacggaggacaggtctcggggaggggcggcctggccctcggaaaatggcctggtcattttcatgaggaattcattcccggaggaaggcgagaggcactcaggtctttccatctgggaatgaggacagtgtggcaaggctgccagtaccctgcagagacacccccagctctcacccagaggcccctctcctgccccagctctggccgaggcactgaaccaggacactggcttgcatgcccagagacagtggccaaggggaccaacatggaagaggaaggcagcagaccagattgcagggcgggactggcccacagctggcctgggtgagggtggggtctgtctacgtaatagtggacagtggccaccaggcctgaggggtgcctcggtggtgactggtggcttaacctttgagactgatggggctgagccctagctctacaaggggctgctcctgtcctgtgaggccagtccagggccaggttctcggggggtgtgcacacctcacacacacatcccccgcccttaccgcactggctgtcagatggctttggtttctagttgtccttggcgggacagagtgctcctccatgcaccctcagaacagctctgtgaggtaggcagggaaaatgcgaccatcctgtgtaaccagtgggaaaaccgaggcacagagg

SEQ ID NO: 481262 - DNA, 1000 bp, Homo Sapiens; identical to SEQ ID NO: 308198

SEQ ID NO: 481263 - DNA, 1000 bp, Homo Sapiens; identical to SEQ ID NO: 308199

SEQ ID NO: 481264 - DNA, 1000 bp, Homo Sapiens; identical to SEQ ID NO: 308200

SEQ ID NO: 481265 - DNA, 1000 bp, Homo Sapiens
gtcatcatggcccgttctcgatggtcgctgtctcttcggagctgttgggtacacctgcagactaacaacagacaaaacaggcacacaaggattaatatgagatttataatcgtagtacttccaatggtcttaacccaagtgacagggttaagatttgcgaggccatcagcaactcctgcaattgcctcagttcctggcaccaaatttaaatgggcttttgatgcttcgaaaatttgttcttttaatttggaaatgtctaaagtgagattatcttctcttccctgtagatggcgtctaaccatgtcccagtgatgctcagactcattataaatttggggtgtaatacaaaaatctgacgtattccagtcacattgtaactggaaacgatgttctaagctcatgagtctgtctcccatccaaatgacagtttgtctaagatcattaatttgatttgccaatttttgatcaatactagattgtgaattccacaatcttgtagaatttttttgccaatcattaacaaagtttactgactgaacagaagagtgcaatgcaactcctgctacagcagccgtagctgtgactgcaattaatcccataatcactgcaattaaagtaaaaatgaatcttttggatctatttaaaacaccttttaatacttcagtcaaaatatggacggatggcgaggcctcccacggtcggtccatggacacagggatccacacgccctctcttgctctcaccagcagaatacggtgttgccaattaaaagttgaatcaatgcaagtaagcaatctacaattttcacaggttatagtctgggagtctggtttaataactatatttcctacaactagcatataagggggctttacgcaactttgtaaaggaactgttagactggaattcaggtcaatagtataaaatggcttacgatctcttgtttctaaagtttgatttccagaccaaattctaatgtggtgtgaagccacagtaagcc

SEQ ID NO: 481266 - DNA, 1000 bp, Homo Sapiens; identical to SEQ ID NO: 308201

SEQ ID NO: 481267 - DNA, 1000 bp, Homo Sapiens
ccagtccttggattaagaagggaaaggggtggggaggcggcccaggggctgctgccccctgcctcccagactacgtgaggggctggggccgccgtgtgcgcttggtccggcgggtgggggcggagcccacaaactcgaactgcttctgcttctcggcgtggttggggaagggcagctggccttggtagaggcgcttgatgaagtgggcctcgcgctggttctggcggctgcgggaagcctggcggggccgcccctgccgcgtgaaggccatgaaccagccctcgtgccgggcgttctggaaggccgtatagttgttctccagcacgatctccgtgaacacgcagtctttgctcttcccgctgggctgcgggagaagcaaggacaggaagggcatttgtccacctaccctggtctggggtgtcgcccttacggcctattttggacgactgaggagggacaacgggaacaacggggccgtgagcccagggaactctgcctggtgagatggcatcctatttagagaggcaacagtggccaacaagaacacgctttgtggatctgagttgcaggcttgtcgtttagcggtcctgaaccaggctgggcctcagcttcctgagatgtaggtgaagatcaaggacctgcggcatttcccagcatgcacgggcccttagcactgaaatgctcatgcagcctaggtgaggggtgctgctgggcatgggagaggaggcagcagcctccaatgagaagaaagaagggtgccagtgcagccacccatcccactctgtctgcaatcaggggtctgtgcccatttctacagacaagaagcctgaggcttgacaaagataagcaaaccaaaggttatttggtcagcgacagccgaatgggaagctgggattgcctggtttcaaacgaagtggaattctcccacccagcagggcccggcctaccgtgtgctttggtcacaggggcagctgcttagtgtctatcttgctagctggag

SEQ ID NO: 481268 - DNA, 1000 bp, Homo Sapiens
tttttttttttttttacaacttcaaagatttattatcaactgtgcacattcaagttcacattcctatggtgtataccataacaagggcaatgggagatggacgggactggttgaagatgtcttgctcagaacccacaatcctgggcaagcaggggtctaagagatcccagggtccacactacaggactgagaaaatgcacacagggtcctcgtatatgaagaaccaccgaacacatatgaacacaaacaaatacaggatctccagtttctgtaaagagtctgcttttgttacccgtccatggatgagacccactgcccaaacgtgtggggtgagaggcatgatcctactcatcagtcaggtgcacacagtggcagtggggttgagcaacaaacaggtctgtgtgttcacatacggcatacccaggcctgactcacgcctagtatttaactctgtcgttctccattggtacaaagagagaccctgagctgagtatgaggacacaaatcagaacaacctggtcctaggggtgctggctgagccacagacctgcagagtggccgtgaaaggttcctgtccacgctggcccttcaggaacagcatccttggaacctggcaggggctaactctgtagtgtgaactcataggtgttggtctcccagcgagaggtgtctttgtccagcatgctccgttcagtgaacgtcacgtggccatttgcatccacaaggatgatggtgttggttctggtgccataggaggcacaccggcaccacacagctgcatacttgttcagaattggctgtacatactcctggccctggtcctcaatggctgggtctggcagctgtgcctcctcattgttgaggacatctaggagctgagtgacaaggacgtccttagggagtgcttcgctctgctccactgcttccatgaagagttgtttgccaaagcacagcttcttccagggcgtctccagcagggcattgcttagcccataggttc

SEQ ID NO: 481269 - DNA, 1000 bp, Homo Sapiens
ttttttttttttttttttttttgtaatatgccacaatttttattgcaacgtggccatttttgtgagggtggggagtttgatctcaaaacaatgttccatttaaggctcttttatacagaaattgccatcatgactgatattcaaaatatctttagtgttgcaggactcacatggtaaacataaaactcctacacttattcagtagtgtacactcaatggaaaacaaaaaggcattaataacagctatttcttttaagaagatatgcaggtaacaggaatgaacactgaggtactaggataagttgatgacacagttaacaaaacttaattggcattccttttaggatattaaacttattacaaaaagtgcttttaatgcatagtgttatatccgtgctgccatatcactaaaataggcttgccaaggcaggtgaggtgtatgaatgctcaagcctcacagaactgcaatcaagtgccaactataaataatactgaaaaaagttgaccatctgaccagtggataatactttcaaggcattcaattagcttatcctttgcagtattctaagctattcacattgacgatcacatacattgtagtgcttgctgcaagggaggcatataaccagttgttttggctaaaatatgacaggaaggcattccttgggttctatataaaagtaacagtattcaacagtctaatggcaatcactgataggctgcttaaataaatgatatttccttcattcattgtgttggaagggcccagtggaaagggggaaatacaacaaaaaaccaaaacctaatactattccaatggactgagctggagaaatggaagctccttaagatccagatggcacttgactgtcattttataatggttttccttcaagtgaaactactacattgcctcccaatttctctccaagtgtcgaacggtccttaatatcatccaagccatttacttgccactcatgtttaatacctgtaaatttct

SEQ ID NO: 481270 - DNA, 1000 bp, Homo Sapiens
ctgggctcgagcagttctcctgcctgggcctcccaaagtgctgagattacaggcatgaaccactgtgcccagccacaagtttgttttgaagcaggagcagttctttctttttttttttttttaaatagcccagaggtcctttattttattttattttttaacatctattatgccatgaattcatagggaataggttccagcagctcaggctccttcccattggttctcacaaagtgtgcttctctgggtggagcaggctggcgcttgagttgaacccaggtcccttgctctttggcttctttctttttctgatcattttccttcacgcgtttcaggaagctatcttggctcttagagtgcttaatgtgctccatacgcacattatttctcttggcaagaatcttgcccttgtttgtttacaacaatgccaacagcatgctgggtaacattgtagacttccacttttgccatggtaacacttgtggggcattcctttttgaacagtacgcattcctttgatgtctacaatatcacctttcttttttttatttttattttattattattatactttaagttttagggtacatgtgcacattgtgcaggttagttacatatgtatacatgtgccatgctggtgtgctgcacccattaactcgtcatttagcattaggtatatctcctaatgctatccctctcctctccccccaccccacaacagtccccagagtgtgatgttccccttactgtgtccatgtgttctcattgttcaattcccacctatgagtgagaacatgcggtgtttggttttttgtccttgcgatagtttactgagaatgatgattcccaatttcatccatgtccctacaaaggacatgaactcatcattttttatggctgcaatatcacctttcttatagatttgcatatatgtggccaaaggagcaactccattttttctaaaaggcctagagaacatatatcgggtgcctctcctctt

SEQ ID NO: 481271 - DNA, 1000 bp, Homo Sapiens; identical to SEQ ID NO: 308202

SEQ ID NO: 481272 - DNA, 1000 bp, Homo Sapiens
aatgaatggaaccacttccttggtatttccaccctcagagctaaaaaattcgtcccactggcaaacctcagagtctcccttcagggccagaattactcacagatattcacagcactgatgccatcacacagcctggtgcaggagagaaaaggtcagctttagcactgggcattaattcctgacaatgacaccagagaccatgtggtcaccagctctgaactcagtcaaccaagaggtcacccaagcccttcccagaaagtgagaggagggaagacctgggtctagcaccctcaaaggcccagcatcgtcccaaccctgtcccaaaacaacacaagtgccaggctctcccagatccccccaggaagtggagcctgtgaaaatgcagcaggacacaaaagaactctccaactgtcccaataactccacaccaggcggactccccaacccccacagtctccctaagcctcaggtttttcatctaagagaagagacaaatatcttcctatttgtctttcagtgtgagacaccattccatcctagccccaaccaatgttgttcttgaaccagctcccaccagctcacaagagcctattgtgcacatttctagccaattctacatgaagtcacagcaacagcctgaaatcagccatgacagaagtatatacaactctgaaatcggtaagtgttataaattagggcattgtttatctcagagaacaagttctctgagacaaaccattgtccctaatagatcatgcaaggagcctattggaaatcggcctgtggactcaactaagactccgctccttggactgtgctcaataccagtagaggtcctaaaagggttccaagatgaaaacagaagtagtagtgagggctgggtaagtgatggtgctaaaaagtggggcaggtctatgcagatgagctctgggcccagctctgcaggctgcacccacctctgctcctcaccatctagaagttggcaagaagaggcagcctt

SEQ ID NO: 481273 - DNA, 869 bp, Homo Sapiens
agaaaacatttgtagatgatgtcctgtgcccaagtatgttagtttccaggacactggggacagcatcacaacatagaaagtaagaagaaatccaagctgtttaaccttctaccattctcttgagtactaaacccagggcacctttggccacttgtggggtttcttttcttctttattctctatgtaaatattgctccttgggacaccagcagttttgcttcttccactcttatcacagactaagtgtggaggagtgttaccctcagtgtcttggatgattgtggatgctttgtagtacagaaggatatgaatcatcttgaagttacccttggctgtggcctggtgctttgctgtagcctcataatgatccttaccatctggattagccccaccttctagtaacatgagagcaatctcatgcctgtttttggaagctgcatgatgtaggggagtagagccattttgattgacagcattcacttgagcaccttttcccagaagggcttttacagtctcattctggccagcacaaacagcagtctgaagaggagaccaatctcgcatagtctttatcattcactggcactccaagttgaaacaaaaattcaataatttatgtatgtatggctgagcatgcccaatgcaatgcacttctgtcctggtcagttctcatagccaggggtttattggccagaatcctctccttcacctcctccagcttccctctgtaggccaagttgcagaccataagtttagacacacacccgtctgttttgctttcccaggattgatgttttctttctgattagtttttatcttaacaggtactaaatgtttccacagagacataacaaaatctgttctttaaa

SEQ ID NO: 481274 - DNA, 1000 bp, Homo Sapiens
gagataagagtctcgctatgttgcccaaactggtctcacactcttgggctcaagccgtcctcctgccttagcctcccaaagtgctgggattataggtgtgagccactgtgtagaacattcttatgcctttttcagtggaaatatgaactcatttctctcgagaacatgtccaggaatagaattactgggtcatgaggtagccatgaaggtaggcatctttagaagatattaccaaacagttttttatttatgtatttatttgagatgaatctcactgtcaccctggaagaggctggagtacagtggtatgatctcagctgactgcaacctctgcctcctgggttcaagtgatcctcccacctcagccttccaagtagctgggattacaagcgtgcaccaccatgcccagctaatttttgtatttttagtagagatttcaccatgttggccaggctggtcttgaacccttggcctcaagtgatctcctgcctcagcctcccgaagcactgggattctaggtgtgagccactgcgcccggcccaaacagtttttttaaataagagatccagttgctccataaccttgccaatgcttggcactgtcagtcttttttaatcattctggtaagtgtatggtggtatcttattgtggtatcttaatttgcatttatctgatgaataatgatgttaagctataatatattctttacaaaaagattacacaacaaaccaaaatattgacattggtgatctttgcagaggtgtgacagtagtttttgttttgctgttgttttttgcagcagtctttctgtttgctaagttttctgcattctctaaatttaaatgcttaatttttaaaattatttaattatgaaatccttcccaaaagcccatttatttgttcttataaggtataataaccacaatagtaatattacaagtaaagtcactaagaatcatttattgagcacctgctgtatattcagcattgtgggaggagc

SEQ ID NO: 481275 - DNA, 1000 bp, Homo Sapiens; identical to SEQ ID NO: 308206

SEQ ID NO: 481276 - DNA, 1000 bp, Homo Sapiens
agaaagctgcagtttgtgaatttctcttgctttttaaaacagaatatttccaaaacttgggcatcaatgcttggtctttttaggtgggggatagaagactgggccatcttcacagactctcagaccccggctctcggcggccccatttgccagccagacttcctgcttgggggacggctgctcccctggctcggtgcagttttgcagctgctggtcttgcttagtgaggcacagttctatctgaccaattgtctgtacttcctcatcctggcttggtggaaggcactggattttgggtatcactccatatactctggcaagggcatctttaaaatctgcaacttggtagtaattgatggatggttttatccccaattttagaagcacactgttgaggtccagctccctatagagttccaggcttctgccaaagtacttcttctgggagttgagcgcatccacctgggcggcgcaggtcccatgcttttcccactcatgcttccagaagcggctgcgattgggaaacgagtgaattacgtcaggccagtatgccctcatttctggcaaaagatccttaatctcttctaaattgaagggccacgatctattacatccttcacttttatcgggccatagtccatgtattgtccagtaatccggagggtctctacagtcgttttgaattttctcgcatactgtctcaggccagtgctgaaccataattagttttttccactcatggttgtcacgcaggcgcttgtccgcaccgcccaggcaaagcaacgccaggcagaggcagcccagcagggccccgcgcagggctgcagggcgcatggtgccgacctgcggagagaacgctgccagctgccgctccggctcccacttcccacctgctgcccgaggaagacttccgggagaaacgctgtctccgagcccccgcgccgccgcgctccctccgctgcagcagcggccaccgggtgcgcccggagccctgggacgg

SEQ ID NO: 481277 - DNA, 333 bp, Homo Sapiens
  misc_feature (2)..(2): n is a, c, g, or t
anaaagaggagcaggagaaggaaaaagaggaggaagaggaggtggatgaggaggaggaggaggaaggcaaggagggctgccaccccagaccaggccagtcctgagcagtgctgggtgcagacggagcagcctcacttgttctgttggatcagcagccgcaggctgttgggctcggtcagggccacgtcagcatccacgctgaagtagtaggtgcagctgcggtcctgccggcacaggtctctgcaaggaggaggacacagggtcagtgcacctgatcctggagctactggtggctgctcacatctgtgaccacagtctggcttcaccacatat

SEQ ID NO: 481278 - DNA, 1000 bp, Homo Sapiens
  misc_feature (550)..(550): n is a, c, g, or t
  misc_feature (561)..(561): n is a, c, g, or t
  misc_feature (587)..(587): n is a, c, g, or t
  misc_feature (591)..(591): n is a, c, g, or t
  misc_feature (601)..(601): n is a, c, g, or t
  misc_feature (619)..(619): n is a, c, g, or t
  misc_feature (628)..(628): n is a, c, g, or t
  misc_feature (635)..(635): n is a, c, g, or t
  misc_feature (640)..(640): n is a, c, g, or t
  misc_feature (642)..(642): n is a, c, g, or t
  misc_feature (679)..(679): n is a, c, g, or t
  misc_feature (681)..(681): n is a, c, g, or t
tctggtctctggcactgttacctggggcccctctgcctcaaccacctgaagctctccccagctagccctcctcatccccattgccggccccttgacccggctggctcctgctcacctcgtaatccaccccgactcggttcagggcgatgttgatggtgaaggtggaggcatcatggtgtggcatcagtgagggctgctcatcaggcttgtagcggacgacaaaggccaggtcaaactgggcctgtaccaaggcagggggacaagagagcccgtgttagttaaggaggacacaaaggccaggagaggagggtgcacacatggggcctggtctggcctgctgcaggtcagcttacaggggccaggtctacatggggctctatgctcgagtgcctgcaactacctggcacagaaaaggttctcaacaaaaatgtatggacagaggggagagagggagggaaggaagagaacagaggggaaggaagaaaggaagggagggagggaggaagggaggaaaagggaagagaagaaatgaaagggaagagaagaaatnaaagggaaggnggccggacatggtactcacgcctgtnattncagcactttnggaggccaaggtggctgntcacctgangtcaggngtttnanaccagcctggccaacatggtaaaccccatctctactnanattacaaaaaattagccagacatggtggtgggcgtctgtaatcgcagctacttgggaggctgaggcggagaatcgcttgaatctgggaggcggagattgtagtgagccaagattgcgccactgcactccagcctgggtgacaagtgcgaaagaaaagaaagaaaaagagacagagaaagagaaagagagagagaaagaaagagagagagagagagaggaaggaaggaaggaagggaagaaaggaacgaaggaatgaatgaaaagacaaagacaaaggggggcatccaatcctcacaaccctttctggcaactatccagg

SEQ ID NO: 481279 - DNA, 1000 bp, Homo Sapiens
gatctgaaaagggagaatggacgaagtaagttaaaactgaagttcagagaatctttcaccttggtttggctagttggttgacagccatgttcagtgtcagtgtggtgcagaaacttctgttatgttattattgttatttgattacattatttttaaaatggctgctcccttacataattcagcataattctaaaaatctgtggccatttctctgcaaaattaagctgattttacaagaaatgatgatgcaatgaggtgtcagtcacacagatgcacccgagtggcctctggatcaagagcttgtgatcacagcctttcctgaccctcattttctgtgacatttggtgactttcaaccttcctaagaccacagaggttctgcaggatatgtacaatctgttgtggttcagctaaactagatttgtgcctccaggaagacggaaagctcagacatggctgaaattgttcagttttgaaaaatattcaggagtccttaaaaacaacaacaaaaaactagaattgataaatgaatctaagaactgattcttaaaaaaacccaatacacaaattactaaatcattaatcaactaaaaaaatggaaaaatatttgaaaaaggaaacaacgttggctaaaaatcttttattctaagtagcaaatataacaatctctcctttctcttacagaaaactgtgggtccatttcatctaaaaaattaaaacctgtgaactattttttaaacgcccttagtgagagcaatatattcaccaaaggaaaattaagatcaccgacaatttcaatgaaaacgtccattttctgtgcttttcctttcagatttttcacatatgcgttcacgttagagtaagcaggtgcagttaataacccacttttttacttgtcagtttttccccacatatcacaggctccaaaatcatgatttttagtggttacataatgttcatttcagttaatgtgtcataattttcttagctactgccctggt

SEQ ID NO: 481280 - DNA, 1000 bp, Homo Sapiens
cattccaatccttgttaggtcaggcatcagaaccatgtccttcaataaaccttgaggcattttattctttttggagtgagggcagagagcttatgaagtaggagggaacgttcacataaaacatctttgatcatgtggtagatgatgaataaagtatgtatgaatttgcaaatgataactgtattgaaatctgttgttgaaaagtgtaaattaaaatgaccaagtagtagatgctagaaaattgtcttggaaatttaatatttctacttccttaaaaaaaatttaaaaattaaaaaattttttttaggtaaatgtgctcctaaaaagattgtatactcttttactaaaaagttttgtggaaattaagtaccatttgtgggagttgctcatttattattttaaaactttctacatttattattctgcaaattctgaaatagttatgacctttatatgtaatttatacatttgtctcgctgtttttcattgcctaaagattgatatttgcactttaatgcttaaacattttgtaattttacatttcttacactcagggagaaaaagtccacattacacttagtgtatttatgatataattttgggaagtgtattatttaaccatttgcttcattttgtgattaaaaatccattagtggtaagcatttttaaggtggcattttcttttaaaactttagagctaaaatatgttttcagattgctacttctgaactctgtccttcaactatttgacttaatgtcgagaaaaagggaagattggacattaagggaaattcacactgaaatttcaggcttaatcttcaaaaaaaaaaaaagttgtccttattttgttttaaagcagaaatactaggcaccaaggtggacgggacatgggtaaaggatgaaaacaactgaatcatcaagagagtatgtctagttttccagttggtctaccttttctagtgtaaagacttaagacattcaataacttttagtacagttc

SEQ ID NO: 481281 - DNA, 1000 bp, Homo Sapiens
  misc_feature (9)..(9): n is a, c, g, or t
  misc_feature (17)..(17): n is a, c, g, or t
  misc_feature (27)..(27): n is a, c, g, or t
  misc_feature (59)..(59): n is a, c, g, or t
  misc_feature (80)..(80): n is a, c, g, or t
  misc_feature (89)..(89): n is a, c, g, or t
  misc_feature (127)..(127): n is a, c, g, or t
  misc_feature (144)..(144): n is a, c, g, or t
  misc_feature (152)..(152): n is a, c, g, or t
ttttttttnaagacaanagtctcggtntgtcccccagggttgaaggcagtggtgggatntcaagctcgctgcaagctccncctctgggnttaaatgattttcctactcagcttcctgagtagctggnattacaggcacacgccnccatgccnggttaatttttgtatttgtagtagagacagagttttgccatgttggccagactggtctcgaactcctgacctcaagtgatccacctgcctaagccttcctaagtgttgggattacaggcatgagccaccacacctggcctaaatttttttttttaatgagtgaaggagtccatagtctttcatacttaggggtgatacaagaaaaggaaaaaggtttaatgacaactgccactttcatttattcattcctttgttgatgtacttttgggctgggttttgctgttataagctaaactacaatggacatccttgtacacattccctagagtccaagtacaagattttctctagggtgttttcctggaaaaggaatgacttgaggagtatggcaaccttgtgagaaatgactgattcgaaagatgtgtcccatagcttttgatacatttttctccgaagtcatggttccagtccacactcacaccagctgtggaggagttttcatttacccacgagctttgttatttctggttttgtcagtcttttcaattctgccaatctcatagggtgtgatggtatctcgttgtttaaacctgacttctcttgttaaggttgagaccgagcatctggccccatgtttgctggctattcagctttcctcttctgcagactgcccgtttgtccactgctctgtttcagtaacttccatataccaagaactctctgccttccataactcacatcacttaaaatacgaattttttttgatgcttagagaacctgatttccttccaaccaattgtgctctcctaattccaacaaccaaatgaagcttcaactcttctttttgt

SEQ ID NO: 481282 - DNA, 1000 bp, Homo Sapiens; identical to SEQ ID NO: 308210

SEQ ID NO: 481283 - DNA, 1000 bp, Homo Sapiens; identical to SEQ ID NO: 308211

SEQ ID NO: 481284 - DNA, 1000 bp, Homo Sapiens; identical to SEQ ID NO: 308213

SEQ ID NO: 481285 - DNA, 1000 bp, Homo Sapiens; identical to SEQ ID NO: 119919

SEQ ID NO: 481286 - DNA, 1000 bp, Homo Sapiens; identical to SEQ ID NO: 308215

SEQ ID NO: 481287 - DNA, 1000 bp, Homo Sapiens
ctgcaggtgggtggtcagctgcaacatggcctggcagcctggcccttgaagcactacacaggccacttcctacaggaagcctccctggatctccatatcctcccctgagctctgaacctttccatcatacttagaaatactaataaaatgattaaagaaggtgtgtctttaattgaagcatgatttaaagtaaatgcaaagctaaaaatcagatatatggaaaataattatttgtattatatagggcagagtcatgttagtctggttcctccaagaagcagactggagatgggattagacccaatatggtctgcagattttattaggagaaatgcccatgagaggaaatggggagggagccagggaaggcgggtgaaccagcagactgtgttgcaagtataaccccacgtgaacgagggagggagggaaggttgggtggaacgaccctgggtgccatggagcctaaggaagtttcagcaaggccctaaggggttctggagccaaagtcagtcatcagaggagtcccatgactcccaggaattggcctgccttagtatttctgctgtgctcagccattgggtagggcagcttcagtgcaatcacagcagtggatttgagggtgcagctgggatcttggtcagttgtgtttcctatagttggagaactgccaagccacagagttggagaagagccacatcatgaaaagatctctaaattggtgtctggggatctgtgctctaattccgcctcttgttacttacaagctgagccatgaggaccaggtcacaggacctctttggactgcagtttccctctctgtaggcagggatggtaactcctgccctgtttccctaaccactgccactccccaccctctagggttgtcaatgaaatgaattcaccaacataaaatggttttgaaaaatcctaaagagctctaattaccacagtattaggcacagttgacagctgacagtccaagtattaataagaacctaaa

SEQ ID NO: 481288 - DNA, 1000 bp, Homo Sapiens
gagtgatcctcctgtggtggcctcctaaagtgctgggatgacagccactatggccagctggtttgtttcaatttgagtgacaaatttaggaatcagggctccagcttttcactgcagacatttattgtgggtcatcttccctaaggcactagcagagggggaatgggccacagcagggctgcagccacggtctccagatattgcccagcctgtccagctgcagaggaactgggctgagtgtccgctggtgttcccgcatcacctgctggactcgttccatcacctgatagaacacgggctctgaggctggtgtgaggatgtgggtctcagaagggtctcttgagaggtcaaagagcaaaggtagatcgtggtggactactttttccccaaagcacaggcagacctttcttccatagcaggcaccggctccctctggctggaacacaggcgtcacaaagtggagttccacattgttcctcctggtggaaagataataattacagagttggcatagagaaatagggtgccttgctggtgaatggcatcttcatagggctaaaaggtaatttttcttttttttgtgcaagagtcttggtctgtcacccaggctagagtgcagtggtgcaatcttggctcattgcaacctccatctcccaggttcaagtgattctcctgcctcagcctcctgagtagctgggattacacgtgcctgccaccatgcttggctaaattttttttttatttttcatagagacggggtttccttatgttggccaagctggtcttaaactcctgacctcattatgtgctcaccttagcctcgcaaagtgctgggattacaggcatgagccattatgcctggcctccattaaaaaaaaaaattaaaattagctcagtgtggtgtgtatgccatagtactagctactcaggaagctgaggttggaattgcttgagtccagggggtcaaagctacagtgagctatgatcatgccactgcact

SEQ ID NO: 481289 - DNA, 496 bp, Homo Sapiens
catccctagaaaaagaattccaggattttccctcctgtgtgttttcgtcttgcttcttcatggtccatgatgccagctgaggttgtcagtacaatgaaaccaactggcaggatggaagcagattattctgccatttttccaggtctttgagttgcacgtcaaatctggagctgatcactccacacttgtttagcctgcctgtgaggttcacaacaatttcccagctctgtggtcatcaatgatttcaaattcgccagtgtaaccatgcttcatcatcacaatgagaaaccggacgatgactttggagcacggcctaataagcacctggcgtttgcctctcttttcggcattgttgatggtcttgagagcatctgccaggacattcatgcgcaccattgtggcggtgcggaaagagcttttgtatttttttttttttttggagagacttggtttctccatgttggtcaggctggtcttgtactccctacctcaggtg

SEQ ID NO: 481290 - DNA, 665 bp, Homo Sapiens
ggaggctgaggcaggaggaaacgcaaaaggaaatgattttgtttgtttgtttgttttgttttgtttgttagttcatgtcttttattaactcatacagttccttgtcttctggtttgttgaagcagtaagtcagacaacatttgccacaataatgtctgtcatagtggcttgccataaacactccagcaccacattcatcagaagggcactctcgatgaaggtgactaattttgccattctcgtctaccttatagtatttcaggacagccagcttaatcttcttcctcttgtgcttattcttcttgggagtggtgtaagacttcttccttttcttagcaccaccacgaagtctcaacacaagatgaagagtagactccttttgaatgttgtagtcagacaaagcacatccatcctccagttgcttgctagcaaagatcagtctttactgatcaggaggaattctttccttatcctgggtcttggcctttatattttctatcgtatctgagggttcaaccttgagggtgatggtcttccctgtgagggttttcacaaaaatctgcattttggtggcagctccactgcaggtggctaatggaaaaggaaggaaatgttttaagatacattcctaagggttgcacattgactaatttgatcttgtacaa

SEQ ID NO: 481291 - DNA, 910 bp, Homo Sapiens
ttgttgttgtgttttgttgtcttaaaagattttattaaaggtctttacaaggcaacatccagactccagatccagctgccaaggagaccctattacacagttggggctgggtagagcatggcttcctaaccatctgtcctgagatgggcatggcgaatagtatctcatctttagggtctacagtgctcacgtggtcaggcaggggattcttaaggccaatcttaccacttgggcccaggacgcatgagcttcactttgatgcccagcacaccctgtcttagcagcacatggtggatggcagtatcaatgcagtagttaacaaggtctctgctgtggatcatcagatcacacacaaaagttcatgaattcagttctctgtccttagagtttcgctgacaccatgacctcgtagctcttgccccactctccataatgaaccacagcacactacagaaggctctcctcacagcaaaccctaatagtagtttacagcacagactctgtctgggcaatggcatagagaattattttaggccaccttttcagcataaagctttccctgccctcaaggaagccaaacctcttctgaactatctcagccaattcatagatccggtggttcttttcaccaagaacactctgcatcctggaggctaaggtagtgatttctatcctggttggcataacttggacctcagctccagagtagtcaccttctgcaagcttctgagtgaagaattcgctcagtttatttctgaagatgctatcaaacttcctcttcttagaaattttcaccaccatattgctgctgtgcaccaccaaaaggaaaggctattattgagtcctgagagttctttatgtaatctgaatacaaatctttcatcaaatatatgctttataaacatttcct

SEQ ID NO: 481292 - DNA, 1000 bp, Homo Sapiens
ggatccttgattcatagatccacaggcagaaagaaacatgagaaatactagagctcagtgtcctatgctcagacagggctgtatcagacctattcaggcccagagatagctaacctaccagtcataaatactggaggaaaatcttaacaaaataactgaggtgtaaaaatgcagatgtgtaaaatgtgggtcacttttttttttggagacacggtctcactctgttacccaggctggagtgcagaggctcactgcagcctcaatctcctgggctcaggtgatcctcccacctcagcctcccaagtagctgggaccacaggtgcatgccactgtgcctggctaatttttgtattttttgtacagagggtttcaccatattgcccaggctggtcttgaactcctgggctcaagcgatgtgcctacctcagcctcccatagtgctaggatcaagattaaggagtgactgggcaagtccaagcagctagccagccttgggttctgcaggtatggctgtgattttatgccattggttctggtggtcgtcttctacaggttaaatatcaatagggacaattctgggtcctatggctgtctaaggacaacagcaaagattcaaggaatctctggtggttgtcagcccaattcaggaagatcaggtcagggggattctaagaacatggaaaccccccatccccttctctgcttctggggacaggttgtctgtcattacccactgggcctttccttccctgcccttttttcctctctctttcctgtacccttgaagataaaaattggagtctgctttttaagataaaagttggaggacttttccaaccctgacagactggtaggacagaaacaactggttcaggagcccttgccagcctctagagaaatcccagaacacacagccctggcacattaataccctgcacagatcagagactgctggccacgcagactcacaaagccacagacttgtcttccacaagcacat

SEQ ID NO: 481293 - DNA, 1000 bp, Homo Sapiens
gggatttatttactaattgtcaaagtcaggtgaagacaggaaaaagagaaaatgcaaatagagtatgcattaatttcagaaatgtgaatgtcactgcccagtagactcgttttcagagcagtcaatttttttttttactagtgtatcttttaattgtcatttaatagctacccaccgcagctgccccccacccttcccttagatgacgacgtttgcaggcttcagggggaccagggaacaaagctggggcctggtagccccactacgctgccagccgggaagaacaagtcacaattacaaattatcacaacaattagcgcctgtacttgggggatctgcaaattgaggaggcctcagctcctcattgtacaggggtctatttggcagtgaccttgctctgcagacgatgatattcctattccttcagcctgagggaattgatgttgatgaacccggtggcctcaattggctcataatcaccctacacgttcatgctcaccggctcctcgttgtagggagagagtgggaactcccagccaaggatgtacacccggcccttgaggacggacacctgcgctttccctcccacttgctcctgggacttggcgatgcagtggcggacaaattcacactcagggctatgccagaaagcggtgtacaccagctcagcaaatttcaagcccaggccttgtttgattttgcacacctcccagtccatggtgaaggccttgatgtctaaatgagtgtggtaaaggatggtgcctgctggggtctcatagatacctcgggacttcattccagtgaagcggttctccacgatgtcagtacggcccacaccgtgcttgtccgcgacttcgttcaggtacaggaactccaaggaggtcgggtgggtggagccatcgttgacgttggtcaccttcacggggaccccttttttaactcgatctcgagaatgtcaggggtgttgggggctttgaccggttcctaggtcttcgtgtag

SEQ ID NO: 481294 - DNA, 1000 bp, Homo Sapiens
tttaagacatctgagctcatgagattatttatttatttataattattattttttttgagactgaatctcactctgtcaacccaggctggagtgcagtggcatgatattggctcactgcaacctccacctcccgggttcaagcgcttctcgtgcctcagccttcagagtagctgggattatgggtgcacagcacttctgaatggaccctttgtcctggatggaggccgagacaccctgcacaatattcaccttttccccctcgctgaagtatcgtttctggctgctgctgctcttctccatggcatctagcgagcccatgccccagtacttcttgagctgcaccctgtctgagaagaagtactcgccgctgggcctccgtggtggtggccagcagggagcccatcatcactgtggaggctccaagggccaggtccttgaccacgtgccccacggtctggatgccacatcggctatgatggacacaccaaagtgctgagcgtacttggccaccttgtacacagcagtgccctggggctgaccgcaggccatcacttcctgggtgatgcagatagagctgcagcccataactacatgcagtccatccacaccagtgtcagtcaggttcttagcctgggctgctgtcaccacattcctcccaatcacctggaggtggaggtacttctgtttgatgtaatgcaccatggtgatttgatacaccgagttcccttgggaggagtccaagactatgacgttgatgcctacccaggtgagcaggtccaggcagtatttgtcatcctcatgggtgcccacacctgccctgcacagcagctgcttgtgggaatccttggagcccagaatgtagtctcgattcttcttcaggttggtgtgggagacgatgcccactagctcatggcgatcattgaccataggcagcttcccttgctaggctgaaggatctcatttgcctgtttcaatgtcatgcctgctggagccaccatca

SEQ ID NO: 481295 - DNA, 1000 bp, Homo Sapiens
ctagaacttcactgtaaaacttctcccacttctcgtatcaaacatttgaaaccaaaagtcaaaataaagcacatgtattagatttttaatcctctccacgaatgtcattttaccacttaattcagacagaacagcaggtatgcgggaaatggggaatggaagtcctccattatacttctcaagtgtgtagccaggagactgtcaacaaaggacatgtatttaacatgactttaacatgctcagctagcagttcaccacaggcaccaagggcatctgcaagaacgacatcaaactttgactcttgtagttttgtcgtaattttcttgttcaaaactacatctttacagagattattaacacagtctgtagattcccaaaagagttcttgtgcttgtgaaaaatatgaccaaaatgcatcttttggaagatcgtatatccatctattgatcagtttcacaacaagaccctcaaaattatttttaattagagatgttggataaacttcaaatttaatagcagatgatttactagggtcaataataatggaagccgaagatgtcaacacagtcatcttgtggcctctccaaacaagttcatccaggattgtctttatattcatccaatggctgtattctgtgggccacagcagcacctttccacaactcccagagctaaagtaacaactgagttgtatcaggagaatatttgacatcgatttcatagtcctcctggtgcaatgcaatgtttcttttcaaattgctgtttctttctgtctttctcatacttacatctgagcataaatcaatcaagtgaaagtataactgctacaattcaaagtagcagttaccatataatttctaaattatcataggaattgtctgttaccatacaatttctaaattaccataggaattttcagattgtttttcacagtggttgcttccatttccattctcaccagcaatgtataagaattttaatttcttcccaacattgccaa

SEQ ID NO: 481296 - DNA, 1000 bp, Homo Sapiens
cagtttctcagctggcttgtctgggggaacctggtccatggttgggatccatgggtccctccggtctcccattccatggtcgtacacatcttgagggcacctacatggtttgttcatctcctgcaaaaacacaagcataccctcaccctcacgttagtaaatctactgaaacagaagctactgaaaaagaagacttgtggctgtagccgggaggcatgccattgctgaagcatttgtaactcagcttcggcctctttggttaattaccacagggtaaaacttaccattgataatgagaagcaggccccttctaacagaaggcacagagaaagcaaatcgaggcttaaatgtaatccttaagccttcaatttgcactgtacaggagggtccactagatgctgtggctcatgatagatcttcagatgtttggtgggcacccacacaggcacctgattgtcacctggagagacacaagtaaatcctcttccccataaaattatctttcccttttcctagctctttgtatgtgcatccctccaccatatatcttgtccagcctttttattttctttttgtcctctcaggtgctgttcagctgcagtcatgggttgatctttttgtaaattaaaaaactttaatgttaataaagctaaatgcaattgcatatttggtgtcttatattcctggtctcctccattttgcttttgtatttgagtttttaaagtacaattagctctttccactattgcctgtccttttgagttatatggaatacccacagtatgggtaatattccattgttgaaaaaatataggcatggctttaccacagtatcctgggccattaccagtttttattttttctcgggttcccataactgaaaagcaacataaaagatgtcttttaacatgagctgtagcttcccctgtttgacatgtgtcccggataaaatgtgaataggtatctactgaaacacgaatgaaagacaattttccaaaag

SEQ ID NO: 481297 - DNA, 1000 bp, Homo Sapiens
caattgatttagattccacatataagtgagagcatgtggtttttctctttctgtgtttggtttatttcacgtagcataatgttctccattcccatccatgttgtcacaaatgacagagtttcttccactttgaggatgacatgccacattttctttacccattcataccttgatagatacttaggttgattccagaacttggctgttgtgaataatgctgcaatgaacacgggagtacagacatctctttgacatattgattttcaatcttatgggtaattacccagaagtgagattgatgaattatatggtagttcaatttttagttttctgaggaacccccattatggctgtactaatttacattcttaccaacagtgtacaagggttcccttttctcacatcctcaccaacacttatcttttgtctttttttattatatccattcttacaggtgtcaggtgacactttgtggtgcagaagatttttattttgatgtaatcccatttgtctatttttgattttgttgtttgtgatttgacttttggggtcaaatttagaaaaaaaaaaaacaacattgcccagaccaatgttatatagttttaaccctacattttcttagtagttttacagcttcaagccttatgtcaagtctttaattcattctgagttgacttttgtatatagtatgagataaggtctaattttatgcttttgcatatggatatccagtattcccaacaccttttattgactgtccttttcctattgtatatttttggcaccttcgtcaaaaactacttgactatgggtgcatgggctccacttatttctaggctctctaaactgttccattgattgatgtgtctatatttacactgtcacccaggctggagtgcagtggaacaatctcagctcactgcaaccttcgcctcccagccttaggcaatcctctcacctcatcctcctgagtaattgggactacaggcgcataccacca

SEQ ID NO: 481298 - DNA, 1000 bp, Homo Sapiens
tcaaatggctgaattaaaatacatttcatgagtcaaataacgtgtatgtttaagaaaagaatagcgtaccttattttttaacatgccgaattaggaaaagttgttgcttggctatcacaaattctatcatcacatcctatcaccttccttctattcttctgctgcaaagacgtggtcaacagaaagtcaaagttacagtgcacagaaaaaccatgaagtttgtgaggatgctctgtaagagtctaacagatcctgaagcagcaggaatgcctgctacagggtggcactaagctacacattctggttctggaggaagggggtgaactcaagtcagttatgcttcgactcatccctgtcctcaaatagttcacccctgagctcctgaggacacattaatacaaatggttaattactatgaattaatccattgctaaatataacatgatacataagtactacaaaacttcaggctaacactggagacttggaaaaaccagttaaactggcatttgaaagatacacagagggaaatgaagatggcacattacaggtaggaggaaagaactggcaggctggaaatcagcatgatatgcttattttggggagaaagggaacaatgaagaaactggaacgcaagaggaacactggctaacttcagtctgtccagaacacagaagtacagaatatggggacagaccaacttgagttccaattgaactctaccgctttgctgcgcaagatactggacacagctgagccccaggctcctcatctataaagcaggtataataacgctggctttgcagggttgccgcaaggattaatgagacaacctttgaagtatctaaagtaggtcttttcacacagaacttactcttgttattcttgcttcaattcccttcaaagctggtggaataatttggaattggcccttttagattttggacatggtgtattttatgaagacagatgtattcaaaatatactgtgatgaggagaa

SEQ ID NO: 481299 - DNA, 1000 bp, Homo Sapiens; identical to SEQ ID NO: 308217

SEQ ID NO: 481300 - DNA, 1000 bp, Homo Sapiens; identical to SEQ ID NO: 308219

SEQ ID NO: 481301 - DNA, 1000 bp, Homo Sapiens; identical to SEQ ID NO: 308220

SEQ ID NO: 481302 - DNA, 1000 bp, Homo Sapiens; identical to SEQ ID NO: 308221

SEQ ID NO: 481303 - DNA, 21 bp, Homo Sapiens
aatgcccctaaaaatccttat

SEQ ID NO: 481304 - DNA, 1000 bp, Homo Sapiens
ttttttttttctctaaacttctcttctcgcttcatttcattcatttgatcttccatcactgataccctttcttccagttgatcgaatcggttactgaggcttgtgcattcatcacgtagttttcgtgccacggttttcagctccatcaggtcctttaaggacttctctgcattggttattctagttagccattcgtctaattttttttcaaggtttttaacttctttgccatgggttcgaacttcctcctttagctcagggtagtttgatcgtctgaagccttcttctctcaactcgtcaaagtcattctccgtccagctttgttccgttgctggtgaggagctgcgtaatcattctgtttttaatttacaagtccatgaaacaggatccaaaattcaaaattttgcaaatataaagatagtatgtaattgcaaatactaaattttgtgacttgctagcataataacacttttaaataaattttggtgcagaaaattcattatggggaggccatgtgggccttcagaaacataaatcaggtttcatgattaagtctgagcttcctctcccctctatattatcattgatttggtctcaataaataccaagtcttgatggaagtgcctgtttccttttttttttttttttttgagatgtggtctcgctctgttgcccaggctggagtacagtggcctgatctcggctcactgcagcctctgcctcctgggttcaaatcaagtgattctcctgcctcagcctcccaagtagctgggattacaggcatgtgccaccatgaccggctaatttttgcatttttagtagagatggggtttcaccatgttggccaggctggtcttaaactcctgatatcaggtgatccacccgcctcagcctcccaaagtgctggaattacaggcgtaagccaccatgcctggcctgtttcctcatctttgacaagaggataacaacaatatttactccttagggttacaatgaggac

SEQ ID NO: 481305 - DNA, 1000 bp, Homo Sapiens; identical to SEQ ID NO: 308225

SEQ ID NO: 481306 - DNA, 1000 bp, Homo Sapiens; identical to SEQ ID NO: 308226

SEQ ID NO: 481307 - DNA, 1000 bp, Homo Sapiens; identical to SEQ ID NO: 308227

SEQ ID NO: 481308 - DNA, 1000 bp, Homo Sapiens; identical to SEQ ID NO: 308230

SEQ ID NO: 481309 - DNA, 1000 bp, Homo Sapiens; identical to SEQ ID NO: 308231

SEQ ID NO: 481310 - DNA, 1000 bp, Homo Sapiens
gagatggagtctcgttctgtcgcccagactggagtacagtggcaccatctaagctcactgcaacctctgcctcccaggttcaagagatcctcccggctcagcctactgagtagctgggattacaggcgtgtgcctccacacccagctaatttttgtattttgagtagagatggagtttcaccatgttggccaggctggtctcgaactcctaacctcatgtgatctgcacacctcggcctccctaagtgctgggattacaggcatgagccaccgtacctggcctaaaatattctttatttacatttaggtttctaataaagaggagcctaagacatgcaaattagtgagaagtttttcatcttttgcatatgagtcattcataccatgatgtgcttttttttttttcagtgccataagtgagaaatgactctcacaactttctcataatgtttaaacttgagtataatacatttattctgggtgcaagccagagctcccgaccacttggtggcctggtttacacttgtatacgtactcttgttttcttggtcttaccgtttggacctctgaatcatttccttcttgctgataggcttgttcttctggatagccaggaagactctcttgggcagcgggcacatgcgattctggtggccctgccgttccctgtcaatgttgaatagtgcatcccgctcggtctgtaacatgctctgcagcttcctctcctggactattaacttcaggcgctttatccgctccccagagcgggagatgaagtcaggtctgtgaaactgaagcgattcctgaagggttgctctcacaaatggcttcagtaggtctctgccagcctctctgcctgggcctgccaggtagccccgaccgtccaggtgctgcccctgacagttctgctcccgcagtggctccctccagggtctggtcttggttattggttcaaaccaggagatgccagggccacaagtgttaggcacgttttccttct

SEQ ID NO: 481311 - DNA, 1000 bp, Homo Sapiens; identical to SEQ ID NO: 308232

SEQ ID NO: 481312 - DNA, 1000 bp, Homo Sapiens
gtgatagtgttggaatttaatcacaggtttacttaacttggattccattgtcttttatagagaaaaagcatatttatgaaattagtattttaatattgtttgcaactaatactgtatgagtttatggtttctggcatatcaagatgaacaaatataacaaaagtacatttaatggctacatctttaagtgtatgaatatagaggtctttaatgactagttaaatccagaaaaaagagagtcaacattcttcctctataatataaggatgggtcttcccttcaaatgcagccttctttactttcccacttaagcacgaaatggtgccgcatataatttttaaaatcaataaatcacagttgtattaagaaatattttattaacaaaacagtaaattccacttgcttagcatttccaataatggataaattggccttgcaacagaaaaacaaacaaacaaaaaaagaagaagaaaacccctttgatacccaatcacacaaagcactagaagggtagggttatgtggcctttctttgatgtcttagggattgaccacttcacacgttattgtagtatttgttcttttaaaaaaggcaacacattacatggataaaaaagaagcataatcaatcagaaaagttacagtctagagatgtaatcaaatttatgccaagtcgtgtgaaatcctcaatcaactgcaaactatgcagggaaccctgatatgtttggtatgaagatacttgggattcaagtcattttctctttctaactctgttcctctcttttctttttccattgaggaaaaaataatttttgctagagtttgtgtaagccaataatattagaaataattttgctgataataaactatatcaatcattgcatgtaactttaaaatttacgctggggagaaacattgaaatcaatcccaaacaacacatttcatagatatactgcttaaaattaccattattcaatttattttctattatattttagaat

SEQ ID NO: 481313 - DNA, 1000 bp, Homo Sapiens
aggtttttttaatttttatttttcactaaacaggcaattgaaatacatggtacaaaaataagtggtaagataattgtaaaatgaaatggacagaatattcaattttccatctatgaaaatttcacaataaaaatcatagtttactttgtattataggcgtgcttggtggatctattcatcctcacataaggcaactgacaaattcctgaagttaccaatagttattttggtgaagatctttaatgcttcagaagttttgtttttgccttaatacagtataaagggggaaagagttcagaaactattttctaaagtagctaaatgacacaaaacaaatgtcaagatactgtgatgccatgccgtgcacttcatttttacacagtaaaagttgtttaaattgtcagcttattcttggtgagttagcggaaacattacatgaacttaagatgagcatatttacagacttaagtttggaaaattccagcgttcttttccccatggcagtaaagattgggatttacaacaaatttcagcatgccttaagatttgcttctatgtatacgccaataaatgtggttctggaaaaaatatatacccctttatacccccattttcaagtacaaacggttcaaagctactacaggttttaataatctgttcacttagtaaagggaattaccacttgttctaaatataaggtgctgccataaattagtttacatagtgaagaagagtgttcttaaatctaagcagctgcacactctgtgaaatcctttcagaatgatagtcattgtggtctgagcagtaatttcctattcttcgaccttggattgaatttcccttagcctacatcttgcctttccagcatatcttacctcaaaccttctttgtgttccattcccacctaagcttcaaaatagccctgtgttgacgtcgtcttccatttgctgagcttacctatggatctccaagaacccagatcttgaaactgctgatccag

SEQ ID NO: 481314 - DNA, 1000 bp, Homo Sapiens; identical to SEQ ID NO: 119920

SEQ ID NO: 481315 - DNA, 1000 bp, Homo Sapiens
aactctaacaaataacatttatttttcttttacatatatatttcacagcctgaacatcacatcttcagagaaagttacttttatgccattgtatttactatttaccacacaggcattgaacattctcattaacatgataagacaatttgctggtaaacatttaaacacacagacattagtttcagtatctcaacatatttttggtcataaccaaggaaatacatcaaaataatgacaacattggctaatattttacaagcaaatatttaactctgcatagtttatacaataggctgtggcaataaataatgtcaccaatctcatcaactattaactggccacaagaagcctaacattcattttaattatgatatgaaatgctctattggtgtagtttcaacatatccttaaatgtttgggtgtttaaccttgaatacacgaaaagaaaaagtactaaactggactaagaaggtgtgtttggttaactacaaatatgtcatgttcacatagtacattcctaacatgaaggcaaatatttaaatagaaaaactagcagtccaaaaaatgtgaatgtgcaaattgtgagtaaaacattgcatttaaatttgcactcatttgcaagttacagtactagctcagtataaacactaacaggaaaaatattcagcaggaaagaatggaaacggcctctcacagcagagaactggtcactgcgcactgctccacagctaagaaagttttccaggtggtctagcgctcctaacaaacaccttatgattatccttcattcaacagaggaggagactgcaggcatgcttcagtcagtggtaagaacaggaagaaaaacccaaatcagcaacattttcttccttaatttggtataaacgtccttttcattatttcaagttactaatttgctaatctcaaatgttttctgaatcaggtttgctaaatgctgtaaagaatagctatccttcatacaatactaggttttattttt

SEQ ID NO: 481316 - DNA, 1000 bp, Homo Sapiens
cttaacaaagataacaaatataaaaatctagtcataaacagccttcaaagaacaattacaaaccaactagaggaatccaccttttagagggttaaggggttagggacttcaacacttaaattaccgccatgttgtcaatttcacaatggctgcagtgatgaggaagtgtgtgtacagcaggtgtaatagctgatttcatcttgctgccatccaaactgaactttactctcttcaggatacaagaacttgcaaatgtcttcatgccactcttggcacagatgtcttcatcccacatgaaaagaggcagtttctatggcaatactggttaagcgcctatcgtgctgcactaatatagtgcaaaaatgtgccttccatatagcaaaaaagatgcaggcaaccagtttgaaaatcagggaaagtagaaacgtattgtattaacacaagtaaattagttttccagacaattaccactataaaatactgaacttgaggactcgttcttctaagacactagtacttgtccagcattcttactttggagagagacaagaagtcttaaaaaagaggctttgtctctgaaatgcaggtcaataaaatctaccatcgaccaccaagatgctgaatttattcagtggattttctgcttagcttagagtttatttgttatgcattgttaaaattgcttattagcaagtacataatctgacataatgtgtgtcattcaactgagtacacatgttaatttgaccatagtattgtggagatcttggtagaaactcttcatgctaggaagttttatggattaacactgcagacggtcttgtatcaggcatcctaactggccaattccaccattattttttagagatgaaagtggtttttcagtcggtagatttcagaaaagatgacataaaactttcagaatgcagcatgtattcagctaaatctcctataattctcacggttgatggtctgtatataagtggtactgtcttaaata

SEQ ID NO: 481317 - DNA, 1000 bp, Homo Sapiens; identical to SEQ ID NO: 308235

SEQ ID NO: 481318 - DNA, 1000 bp, Homo Sapiens
acatcaaaatgtcttttatttgagacacaaaaatgcaaaattgctgagatatcaaacatttcccgatcagctacaatactgccactatgtacaaaagatctgatgataaatgtgcacacatataaaaatacagtatgcattacttatgtacagtacatgtgcaaaatgtatggcattcaaacatgatatggaattgatttcaggggtgcaaacagcaaatacaaaggcatcatggtttttcttttaaaaaacaacataaaggcaatagatgaatggacccccgattgccataattttttgttgattaaactagtgcttcaacaagcagggctctgtagattggtatctttctcctttttttcataaagtgagatgctaagacataatgtgacaatgaaaataagaagagaaacacctatcacattgcatttctattgcaagcaagaaaagaaaactaatttctacatagaaaaaaaactttgtattactactgaatgttactcttaaaccaacaaaacaactctatactattttacatgaaaacaataagagaaatatctacatcttagtgaaaattataaccttaaatggataatacctttttggggctgatttttgagatctcattagtctcaaattttaaataaaaagtgcctccttttggcaaatacttggcaatgcctttggttcctttaaagcaagtttgcattactattggttacttgaggtcaagtacttttggtagatactaaaccctttcctaaatgcttcctcttcctaccaaattagcaagattccttacagcatcacgtagagaggtaattgttacgagtttcagtattctataaactttgttaaagctttgtcttagtagttggcataaagctctgttaaacactatagatgtgatgatatctctgataacatattttatttgattcccgacagcaccttgtagatccgagattgccatcttattgtcacaaagctgtgacaccac

SEQ ID NO: 481319 - DNA, 1000 bp, Homo Sapiens
gagttttataagggttttatttttaataagatgaatagtttaagcttcgtgtctagccctgcaccctcttagcctaacagcacacctcgagcgctgtgccctgggctgctgacgtggcggcaggccgctagcagcagtcggccacctcctgaggcgggcagcacaggcctgctgtggacactctaggtctggccttgtattttgtggtctcagaagcctttgtggggacttctagtgtagggaaggcagtctctctgggagctcctgcaatgccaaactcttggcccaggttcactcctccgatccaagcctggcaggggtggggcatcatggtgtgtaggtatcaggcaggacttgtaagccatcccgtcaagtcaaattctggcttaatgtgtctttaggtagatgacctctgagccacagtttcctattctatgaattggggtttagtaaatctctcgggactgagagccaatgaggccatgtgtgcacacaaaatgctgggcacaaatgaggggctcagcggggctgagaagtacatcccatccagtgccgacatccgcttgcatggtgccctggtaaccttgcctctgccctccccaggccacctcaccgatcagcacctggccgagttcctgcggcgctgcaagggcagcctccgccccaacggcatcatcgtcatcaaagacaacatggcccaggagggcgtgattctggacgacgtggacagcagcgtgtgccgggaccttgacgtggtccgcaggatcatctgcagtgcaggcctcagcctcctggccgaggagaggcaggagaacctccccgatgagatctaccatgtctatagctttgccctgagatgagccggggctggcaggagaaactgaggaaccacagtcctggtggggggagctggcagctgggcaagatccaggcgccacgctggcggttcgtgagtgtcgaggcaccactaaatatagctgtctgccgtccactcattatg

SEQ ID NO: 481320 - DNA, 1000 bp, Homo Sapiens
caaatcgattgttttattgactgcatacagacgcgtttagaaaagggcacgggctccggggggctactccgtcccaggcccgcgcttgtgctgcgcttcgcggagagggctgatcccgaggactgaaactccccccaccccaaccccgacgctttctttcaaaatggaaaaaagaaccccgccccgagtcgccgcgccgcgcccctccccttccctccctccccgcccatccgcccccccgcccgcccccctacactacacggtcacacttcacaggacacagacttttctcctacagggcacgcttgtcagggactacacgccgggcaaacacgattcccgccgaagcaggggcgggtggggcggggcgacgcgaggaccgagacgcgaggacggaggggctcggctccatccggatcccgtcgcacagtcgcacagtcacgagcaggctttgtgcgaactagggcgcgagccctccagagagccgcggcccgggaggccacagtcagcttcctccgcctccggcgctttccagctagggtctgggtcgggtggagccgcgggagcggcgctgttgggcgcacagacctccggaaagcccaacacacggacaacgaaattggcccgcgaccaagtccacaggctcagccgccaaggggcgcgcggtcctgcggcgctttaagttaggagagagacgacagaaaacgcattccctccctaccccccgacacacacactcgattttcccagaggctgggaagggggtgttagcaccagacccgaaatgtcgctgtctttgaaaacaacgaaaacaggaaaatctgagcgcggagctgaaaggcgccccaggcaccgggctggactccaactggccagaagtggggtgggggtgggaggacagaaggatttggttccctgccggcaggaggctttggaactaaaaactaggggttgccacgaatcccggcttctgggagtagggattgaaagggaggagggg

SEQ ID NO: 481321 - DNA, 1000 bp, Homo Sapiens
gtggttggagattttattaccaacatatttacaccttccttttccctctcattttcaggagctgtttcaggcctcctcctcctcccgtaataacttgcagtctttcctatgttataataaagctacattttcttctgaaaactggcaggttctcccttcctaacgcaggcagccgaagagagggtgtcaggagccagagggtgtcaagagcagccagggcacaccggcctgcatgggggcatccctggtccaagtcagtggccagagctgcagcctggctttgtgcccaaagttttgtctgggtgtcaggaaggccatgcactcacatttcatctctttttgtgactggtctgctgctggttgaccctcgttcctccttttttgggcaggaaggtgacatccaggattcaggagagccttctgacttgggtgtgcatgaaagtcacctgaggcccttgacgtgcaggaatccttgccagccttggattgcaagccccaggctatggtatagcaatgtgcattttgtagcaagctccctgggggtggcaggtcccagtgtttttttgtgagttccttcatagaggtttgaaggttcctgaggaccgcgttgtcctccagggcccagctctgagagagtcgctcctgaaactcccagacagtgctccaggaaagcttcatgaggtgcttcctgtgtattttgaatgatgcatgcaccatggctgtcagtacccgcgcgccctccaagatgaacacatcccacagtctcagggtgagcccgaaggatttcccatcaaggaaacaccggaggagcctcgtcagcatggaaccctcaatgcacagcccttccttgcccaggtgtctcatgatctttgggaaggacttgtgcagcacctgctcctggtgcgataggagcttctcgagccaggcagtatttgggctgtagaataccacagggagtgcctctcaccagcgagcaactgggtaagcgcccagaaaacat

SEQ ID NO: 481322 - DNA, 1000 bp, Homo Sapiens
  misc_feature (26)..(26): n is a, c, g, or t
  misc_feature (52)..(52): n is a, c, g, or t
  misc_feature (93)..(93): n is a, c, g, or t
  misc_feature (134)..(134): n is a, c, g, or t
  misc_feature (138)..(138): n is a, c, g, or t
  misc_feature (186)..(186): n is a, c, g, or t
ggcgctggcaagtgtagcggtcacgntgcggtaaccaccacacccgccgcgnttaatgcgccgaaacagggcgcgtcccattcgccattcagntgcgcaactgttgggaagggcgatcggtgcggccttttcgntatnacgccagctggcgaaagggggatgtgctgcaaggcgattaagttgggnaacgcccagggttttcccagtcacgacgttgtaaaacgacggccagtgagcgcgcgtaatacgactcactatagggcgaattgggtaccgggccccccctcgagtttttttttttttttttttcaaggttgagcttgctttatggatgacaagtgggctaggctgggctgtcgggggcaggacgaagattctggctgaactttccaagggacgggacgcttgggatcctggctggtacgaggcctcccacactgtcaaatgtcaactccaccagcactgagacaatgagtagatgagaatgtagaaagagggaaggtggtaggtaaaggagcggaaggaagaggtggggaaagagggaaggagagaagggaaggagggaagagaaagaaggaagaaaaggaaagcatggcccggctagagacaaagccagaggtgatcaggtcagcagcaggagaggctcagaagggagcctctcgggaagtgcaggcagccatgagggctcgtttcagctgctcataggtgacgaacatcaccacgttccaggaacccaagcggagaaaggagggcatgaaccctttgtagaaggctcggggcccctccttctggagcatggtaagggcacagtggccagcgctactgtactggcccagggcagagttcatgtatctcgtcttgaccacgtctacaggggaggcgatgacagtggtgcagaagcctgccccaaaggcagaagtgaagtggcaagggaggtcatctgtcatgaggttggctttcaggagggcatccttgatgaggtcataggtcaccagctcag

SEQ ID NO: 481323 - DNA, 1000 bp, Homo Sapiens
gaattccggaatgggtacaagggatcatttttgctgtgatgaaaatgttctaaaattagattgtggcgatggtcacacaacgctgtacatttactcaaagtcattgaattgtatacttgaaacaggtgaattttatagaatataaattatatctcagtaaagctgcttttgaaaaaaaaagcagcaaaaaaaaccatgagatgtgcataattcaagggtggggagcgggggcaccattgccctccagcctgggcaacaagagcaaaactctgtctcaaaaaaaaaatgtcattctctccccaaaagacttgataaccaagtctttcagttaaagctcctgaaagattttaaaataaatttctgtgtgtttcccactgacttcttaacctcaattaatatattcttttgggaaaaatcaattccagaaaaaactcttcactagcttaaaatgtcccttggcttacaaccaatcattactgttgactctcaagaaactgaagacattcccgaccctgtaaacaaatgaacttcagccataccatttcagatgatatgaagacattctgtatgaaacaccgtggcctgttttctgagaaaaagcaccactcctaagtaaacaatgaaaacaaatcgaaaccaaagaaaacagaacccagcccactctctcggttcatcttgttaccaggaaacagaagtcctacagttattccaaatctcacgtggtcaagtgagcaggagggctctgaaaagtcgaaagcaacaacgtacaagagaacactgacaccaggagaccagccacaaacgcaaacgtaggagccaacccgtgggggctgccgaggtgccctcgccagaccaactcgctgctgggactccagggatgtccgctagttaagtaataaagtctgaatatctgctgtttgccctagctctgagccaatggggtagagcacattttatattagtttataataaacattctgtgcataacatattttgaagt

SEQ ID NO: 481324 - DNA, 1000 bp, Homo Sapiens
gcggccgccggggtgcccagagcccccgcggggggcttcccagcggcgtcgctgctgccccctcccgggggggccgggcccggggggttctgcttggcgcgcatcttctcgcgtttcgccttccactcctccaggaagtctgtggtgctgccgccgaggccgctgctggtccggtagccaccggtcgccatattcccaaaggggccggtcgggctctcacctcaggccgcccaccagggctccggccgctgcctcctcttccttcctgcggccccgaggatgccaggagacgacctccaggagagggacggccgccgctcccacagcagccggcggggctgaggtgaaagacaaaagggggcgggtaagggaagcgtaagatccccgcccgacccaagggtctgcccccgggctgcgccccttggagtcctcgagcgcgcccaccagtcactaccggccagcagccgccgggtccccaccctgcaaagtttctcccacgcacctacagtacggaccccgacgatcgccgcccctagaagggaggagagaggactgaccccacccccaagtcggcccgcccgccccatccccaccaaggtccgcgccggcggcggtcgagatactagggctagacccgccacctgtcggctcgtcgtatcgcctgctccgcgctctagccaccgccggtccgaggtccccgtcagctacaaccccactcccaaggcgaggcgcggagctcctagccggttcgcagaggaggcggggacccagctgtcccgccgagcgtggaaaggaccgggtgtgagcgagcgccttaccttggaggagcttgtaggggacgaggcgtagggctgggatccggctcccaggtgtgccgaagctggcgcgcgctcttccgccgcgcggaaagtgccgcggcaaactcgcggtgcggagctccaggcaatcccaggacaggagggagggagaagaaggagggagggagggagggagggagcca

SEQ ID NO: 481325 - DNA, 867 bp, Homo Sapiens
ctgcgcccaggctcccaggaaggagaaagagcaggagccccagcgcccagggctgaggccgcgggacccccatgctgagaggacgacctggggcgggagggggcacgtgactcctcccgacccccggcccgccccttcctcccgggacaccgcgggcacggccgggaccaggacgccgaggaggggctctgcgggctcggtccagactgacaacaatgccctcctcgtacctgaagaactttcacccctgaactggatctcagttggttaattaattacagacacttgataggctgagagtcccggccccgagctccgccacgccccttccgcccccctcaggccccagcccctcctccctcagaccccggagtccaggcccccaaccgctcttccctcggacccaggagtccgggcccccaacccctcctccctcggacccaggagtccaggcccccccggcccctcctccctcctccctcagacccagcgtccagacccccagtccctcctctctcagacccaggaatccaggcccccacccctcctccctcagacccagtgtcgagacccccagccactcctccctcagacccagggttccaggcccccagcccctcctccctcagtcgggccctggtcggctcacgttcccttcagcctcgctcccttcctgcctgcggccctggccggctcctggctcccgtgactggagaccccagttcctctctcacatcctgtgggaggctgctgctccctgactccaagaacatccagccccaccccccagttgcagggcacaccccaggccctaggcccagcctgtttgtttctcaaaacgcttgtggttcttctttttccttctct

SEQ ID NO: 481326 - DNA, 1000 bp, Homo Sapiens
tctagaaaaatgaagcaaaattttatgaaaacaaaaatgttatgttccaaataaaggctagcatgtacgacagtaccttatatacagcagagtctctttttagaaccagggcactttctgatgtcggtcatccccagtctgcacagcaggtgggaagaaaacatagttttttttttgtatttaaaactgaagcataataaatgaaaatgacttgctgagaccaagtaagagttggaaagatgccatcacccggctttcttctcttccttcactgatttagcaaattacattttcttcaagtgtggagatggagtagctgcccgacttttcagttcagcaactgaatctgcatcatagttgggtaggaggaggttctagcttgttcatttttgatttgccactctacaaggtaaaatcacagaggaccaccctggtcaacaaagtataagaccacacctgcagcaactgtgcccatgtttatgctctgatccttgtattgcagtcttaagacttcttcttcttccagaatcccaaagtaggagtaattattatttaggtcgcaggtagttccataaacacgggcgttgaggacgctggctgttgtcaggaataggagtctctggggttgaaatctgggggctctgctgcctgccctttgcctcggagggtgtggaagaccctccgataggagctcctgaaggtggggctggagaagcagtataccacggggttgacgacactgtgcaggtaggtgaggctgcccgtgacatccgaggtatgagccactgcacaaagggccctgcagctccccagattctggaagatgtgcatcaggactctggccaggaagcagggcagaaagcacagagcaaacagcaccaccaccaaggtgaccagtgcctgggcccgctgaagcttgggctgtttctcaggctcccggagtcttttctggagagccctgatgatgcctgcattgcagaacacgatgaggccaaagggg

SEQ ID NO: 481327 - DNA, 1000 bp, Homo Sapiens; identical to SEQ ID NO: 308240

SEQ ID NO: 481328 - DNA, 1000 bp, Homo Sapiens
ggggacaagggcaggtgtgtttgggggataagagagagaaaatctggggcgcagggatgagaaggctggcaggggcacaaatgcggaccgggatggggatgtcggaggagaccggggcgcgccggccgggcgacagcacgaccccgggaggcggtggaaaccccctgcaactcccgccccggggttggcggcgccgcggaaccgccccaccgcccctactcacttgagtcggaggcgggagcacgtaccgcaggcggagctagcgaggctgggctggagggagggtccagggagtccgagatcccaggcgaacgcgcgccggtgccttttaaagagcgctcggtgggcggcctgtgtccgccccgccctcctcccagccccgcccgccggattcccggagccgcttgccgggctggggcgtgtagcgggcgggctgccctctgcccgctccgggctagccaccaggagacaaaaggcaggaggcccgcctcttcctgcagcttcccgcccgcccggcatcttcccacgtcccgggaccgctccctcccaaagggacccggcagttccaaaagccactgggacttggagagggacttccttcccctccagggaggcccggcggcgggacggtcccgctggaaagtggcccccgccgccctgcgtcggacctgtccaccgcgagcgccgatccccctcttcgcggagacagtcacgggccgggaggctccagcagtagaaagtcagccaaacggggctttccgccacctcccccttgccttgtccttgtcagtaaactcaacgtgattaacttccctagttaacgcatattctctcgtccgatttccagcttctgggaatccacaacttcttattcttaaagagcaaaattcatctagactaaataaatgacgttacgaaaacgccccattcccaaagtgtttcgctcttcccctccaccagggcacagcacgcgatgctgagggggaagaaacctaaaccc

SEQ ID NO: 481329 - DNA, 1000 bp, Homo Sapiens; identical to SEQ ID NO: 308242

SEQ ID NO: 481330 - DNA, 1000 bp, Homo Sapiens
tttttttcttgaaaacactttttatatatttattttaaagtgtatacttaggacaaatggtttttaaaaatgtataaaaataattcacatattaatccaacttctatatttacatggtcccttaaaagattttcattttattattatcaaaaatgtatttcaacaatctccacagtactctcaaaagtcaggaattttaagattttctaatagaaaaattttagtatttacagaaaaataatgaaactaggaattatatcatattttaaaatataacatctcagttatgctgtgccacataagaataatcttcacactaaactataataatcccaagtgctggcattttcgtttaagaacaaagcacaaaaatatttcatagaaaaaaatatttcattataaaaaacatagaaagttgaatgcttcaaacaaaaatatatgaggtctgatttcacaacatcaagtttccatatccactttgtaaacatatactcagtataggttaccaacttaaataaagccagttatcactgaaagaagacatagttaaaaaaaaaatcagtgcaaaaatacgtatcaactaatcaactgacctacgacaattttcataaaaatcagaatttgaatcccataatataaagtgatcctctgaagactttaattaaaaataaaaagctctacaacagcaatcaagttttccttttgttactattctctagtaaatgcttttttttgattagcttttacaatgtcatcaggtgatgctgatttgaagtcaaatggtgttattgctacaagtggacttatttctttgtcctttacatcttgaacttgtctactataaagaaaagtcttatagaggtcaagggtgcgtcgcttgcagcttttcagtgggtaacgaagacacagtgttgaggcaaaagctgaaggtctagcagcaagggccttggtccaagagagagaaaaaggtggtttcctagtcagagagcctttgttgttt

SEQ ID NO: 481331 - DNA, 1000 bp, Homo Sapiens; identical to SEQ ID NO: 308244

SEQ ID NO: 481332 - DNA, 1000 bp, Homo Sapiens
gatccttaatttttagtttccagatgatcagactcctcagcttgaaatccaagggcattatagacttcaagcaaattgcatgtgcattaagactgttgaacttgggacaagtaatcctataaaagcgaaatcattgctgaagcatttttgtaatcatgtattcctcctgcatgttcatttgaaaatgttctcttttggtgtggaggcacatgagctgattatattgagctccatccaccaatttatttattcatctaataaacattttaatgaatgggtatcaggcacgtttatgttttacccaagagacttatttaacagtcattcaaccatttggtcattaatagtgaaaaggtcataggctttggcatgaggcaggcctgggtttgaaacagatcttcaccatttcctagaaaggttgtcttaaggcaaattatttttttagacaccttttcagtttttctgttaaaggaaaaaattgtttgtaaagactgcattgtgactgagaaagggcacgcaaactagatgagtttaatcctcctatctctcacccctgactaaccttatatgtctacacaaatatgcaatgctccaagttggatgtgaaacaaatggtagtataatactcgcccttaaatataatttcagatagccacaaaatataaaaccatttaaggatgtgaaaaaattagtataataaagaagaaaatacagtataactttttcttctgttatttaactggtgtaaaattaattccttgactctcatattttgtaaacaaatatgataatgtatgtggtgatgtacggctttgccttgagaaggaaaaaatatagccataaaatatttaagaaaattctggaaataagggtaatagaattaattttttcaaacatttcccaaatgtgttttaaatggctttcctgaaggagaaagagagagggagagaaaaaagagaacatttagatataattacagataagacctatgcataatatt

SEQ ID NO: 481333 - DNA, 1000 bp, Homo Sapiens; identical to SEQ ID NO: 308245

SEQ ID NO: 481334 - DNA, 1000 bp, Homo Sapiens
atggggcgggaactttttatttgaagcaagttaatcatagcattgccccccagtaccctggtatcctgctacaaggagcatcacaccatttgggcacatggtgtgcccctccactagcctggcatctcagcagacagcagagggcagcagaagctcagctagtggggcccctcccaccagcccccacccggtccactgaaaggcagtgctcctgggggcctctgtggactggtggggccagggctgcaacacgccctcaggccaagctccactctgggcaccctcgcaggtaactcaggtgcttgcagctcggccagctctctaatccacccaaggagcccgcccagctcaagggccacatcccaaagacagggtgaaccaggggacagtccaagcctgagaaagcgacagctacaggaaggaaggcagaaaggctttcagatgaggggaggtcttctgtccatgggtgagctgggattcacggccatgaaggaaacgccaaggagaacagagacagacacccctggcagctccccgggattgcttctgctgctgttgttattgcttcgggcagaggggctttgcccccaggaggccaagcaggccctcagaagctggcaccaccattctcatccttatcagttccggggggggcacgctgggggtgagcagagggggccccctccaagcagagaggcaaggtaacaggagagcctggtaggcagtgctgaatctgcttgtatgcacacgtgccctgacatgtttatagatggacaccgggtgcagtcggggcgtgtgagtgtgtaatgagtgtgtccgtccgcgtccatgtgagcatgcagacggggtggggcaggggtgagtggccccggggaagcatgacagatatggctgtgggctacagcggggagcaagagcaggtaaacaatgcctggagcaccaacaggaaagaccagaggggcagaaggagaagcacaaggacaggaggatgcggcccccc

SEQ ID NO: 481335 - DNA, 1000 bp, Homo Sapiens; identical to SEQ ID NO: 308246

SEQ ID NO: 481336 - DNA, 1000 bp, Homo Sapiens; identical to SEQ ID NO: 308247

SEQ ID NO: 481337 - DNA, 1000 bp, Homo Sapiens; identical to SEQ ID NO: 308248

SEQ ID NO: 481338 - DNA, 983 bp, Homo Sapiens
gcagttgttcactaaggagggattagaagtggctaggagagaatgtgtaaggttgatagtgtggtggagatagctggggagaggtagagggtggcataagattgggaacgagaataagagtgagtataaaagtaaagaatagaacttcatcaggatggaagtataggaggatgccctgccagtaaagatcatctatccactctaagagagacttaagagtggtggtgtggggatagcacgaagagatatcagctgtgatggcttgaagaaacagtgtaaaccatcagtgtaaataagagtagggcatttataggtagttgagaatggagtatgactagatagaagacagtagggatgaatagtttctttttggggctcagcccaattggtgggggtgatttcataaagctgtgctgcaaaaagtagggtaaggatggagagacctaatagaataaagggatgtattaggctcataagggttattactgttcttcagaaatatgagtgagtttaagggaagtaggggagagtacttgtgacttccaggaggaagagagggattaggctggctgcctgatggacacagctttattctggaatggtgaacccagtgtggaagatcctgcaggcagacagcagtcagggtactacagatgactaagtagggtctggtccatcgaggttgtagagtttgagggttcagattcttaacaagaactgatcgtccagctagggtgtcttcatgtggctggggatcctccacttgagagtcacctgaagttgggcatctgtgatggtccagggggcttctgaggtgatcaggcagcattaatcttcagtcgctaagctgagcagatcagatttgaaattcgtgagatgtttcttgggctggtcagtctgaggacctgaggtcataggtggatcgttctcacagagcaaagagcaggaggacaggggattgatctcccaagggaggtccccca

SEQ ID NO: 481339 - DNA, 1000 bp, Homo Sapiens
  misc_feature (4)..(4): n is a, c, g, or t
  misc_feature (21)..(22): n is a, c, g, or t
  misc_feature (24)..(24): n is a, c, g, or t
  misc_feature (28)..(28): n is a, c, g, or t
  misc_feature (35)..(35): n is a, c, g, or t
  misc_feature (37)..(37): n is a, c, g, or t
  misc_feature (40)..(40): n is a, c, g, or t
  misc_feature (43)..(44): n is a, c, g, or t
  misc_feature (47)..(47): n is a, c, g, or t
  misc_feature (52)..(53): n is a, c, g, or t
  misc_feature (61)..(61): n is a, c, g, or t
  misc_feature (66)..(66): n is a, c, g, or t
  misc_feature (71)..(71): n is a, c, g, or t
  misc_feature (73)..(73): n is a, c, g, or t
  misc_feature (86)..(86): n is a, c, g, or t
  misc_feature (89)..(89): n is a, c, g, or t
  misc_feature (94)..(94): n is a, c, g, or t
  misc_feature (99)..(99): n is a, c, g, or t
  misc_feature (105)..(105): n is a, c, g, or t
  misc_feature (117)..(118): n is a, c, g, or t
  misc_feature (120)..(120): n is a, c, g, or t
  misc_feature (124)..(124): n is a, c, g, or t
  misc_feature (129)..(129): n is a, c, g, or t
  misc_feature (131)..(131): n is a, c, g, or t
  misc_feature (150)..(150): n is a, c, g, or t
  misc_feature (156)..(157): n is a, c, g, or t
  misc_feature (159)..(159): n is a, c, g, or t
  misc_feature (166)..(167): n is a, c, g, or t
  misc_feature (172)..(172): n is a, c, g, or t
  misc_feature (183)..(183): n is a, c, g, or t
  misc_feature (191)..(191): n is a, c, g, or t
  misc_feature (193)..(193): n is a, c, g, or t
  misc_feature (203)..(203): n is a, c, g, or t
  misc_feature (208)..(209): n is a, c, g, or t
  misc_feature (213)..(213): n is a, c, g, or t
  misc_feature (215)..(215): n is a, c, g, or t
  misc_feature (218)..(219): n is a, c, g, or t
  misc_feature (224)..(225): n is a, c, g, or t
  misc_feature (231)..(231): n is a, c, g, or t
  misc_feature (233)..(233): n is a, c, g, or t
  misc_feature (242)..(242): n is a, c, g, or t
  misc_feature (244)..(244): n is a, c, g, or t
  misc_feature (254)..(255): n is a, c, g, or t
  misc_feature (266)..(266): n is a, c, g, or t
  misc_feature (268)..(268): n is a, c, g, or t
  misc_feature (271)..(271): n is a, c, g, or t
  misc_feature (277)..(277): n is a, c, g, or t
  misc_feature (287)..(287): n is a, c, g, or t
  misc_feature (293)..(295): n is a, c, g, or t
  misc_feature (298)..(298): n is a, c, g, or t
  misc_feature (301)..(301): n is a, c, g, or t
  misc_feature (305)..(305): n is a, c, g, or t
  misc_feature (311)..(311): n is a, c, g, or t
  misc_feature (314)..(315): n is a, c, g, or t
  misc_feature (317)..(318): n is a, c, g, or t
  misc_feature (322)..(323): n is a, c, g, or t
  misc_feature (327)..(327): n is a, c, g, or t
  misc_feature (333)..(333): n is a, c, g, or t
  misc_feature (353)..(357): n is a, c, g, or t
  misc_feature (359)..(359): n is a, c, g, or t
  misc_feature (362)..(362): n is a, c, g, or t
  misc_feature (373)..(373): n is a, c, g, or t
  misc_feature (379)..(379): n is a, c, g, or t
  misc_feature (381)..(381): n is a, c, g, or t
  misc_feature (392)..(392): n is a, c, g, or t
  misc_feature (394)..(394): n is a, c, g, or t
  misc_feature (397)..(397): n is a, c, g, or t
  misc_feature (402)..(402): n is a, c, g, or t
  misc_feature (406)..(406): n is a, c, g, or t
  misc_feature (409)..(409): n is a, c, g, or t
  misc_feature (411)..(411): n is a, c, g, or t
  misc_feature (426)..(426): n is a, c, g, or t
  misc_feature (431)..(431): n is a, c, g, or t
  misc_feature (437)..(438): n is a, c, g, or t
  misc_feature (440)..(441): n is a, c, g, or t
  misc_feature (453)..(453): n is a, c, g, or t
  misc_feature (458)..(458): n is a, c, g, or t
  misc_feature (462)..(462): n is a, c, g, or t
  misc_feature (466)..(466): n is a, c, g, or t
  misc_feature (475)..(475): n is a, c, g, or t
  misc_feature (481)..(481): n is a, c, g, or t
  misc_feature (485)..(487): n is a, c, g, or t
  misc_feature (492)..(492): n is a, c, g, or t
  misc_feature (494)..(494): n is a, c, g, or t
  misc_feature (503)..(503): n is a, c, g, or t
  misc_feature (528)..(528): n is a, c, g, or t
  misc_feature (531)..(531): n is a, c, g, or t
  misc_feature (533)..(533): n is a, c, g, or t
cggngcaatggcaagagagcnngnaggngagggcngnagncannagngaganngtgcgggngagtngtgtngnagaatggacgcgnagnggagnggggngcgccnagaggagggggnngngacncaggngnggggaggagggggaggggngggggnntnggtacgnngaggngaggcgaggcnggagagangnggcggggagnggagnngagncncgnnggganngggagngnacgagagtncngagggtgggnnaaatggggggngnggnaggggncagaagaggnggggtnnnagnacnaganggggcnacnntnngacnngcangggggnacgggaggggtatgggggcnnnnngnccncgggggagggnatgagnanagggaggtgcngnccngccanaagnggngntggaaagttggggancgggngaaggnnanngggtttcaccanggccngggnaggnaaaaaaaanaaaaanaaannnggatngngccggcctngacctcccaaagtggtggggttacnggngngagccaccatgcctggccaaaactttttactaggtttttagaatctccttctgattcaaggagatcagctctttctctatgatatgagtttgtaaatatatatatataaccattttgtcatttcacattatataaggagcttattttaatgtttttcctccaattcccattgcctgtcatactttctggcagataggaaatgttcagaaaatgtttgtgttacgaacacctttatggaggaaagaagctcccctggcacaaagaggagcctccaggtctgtgctttgggccttatattcagtgcagagacccaggtcgaccacagatattaacacatcccccttcattcaactgccacagctctgcgatggaaatgctggctgtcttttccaggccgaggagggaatttctgatgatgcaggatacaccctccccggagccgcctctcatgatcacagatgctgcta

SEQ ID NO: 481340 - DNA, 1000 bp, Homo Sapiens
  misc_feature (211)..(211): n is a, c, g, or t
  misc_feature (594)..(594): n is a, c, g, or t
  misc_feature (650)..(650): n is a, c, g, or t
  misc_feature (666)..(666): n is a, c, g, or t
  misc_feature (680)..(680): n is a, c, g, or t
  misc_feature (687)..(687): n is a, c, g, or t
  misc_feature (741)..(741): n is a, c, g, or t
  misc_feature (754)..(755): n is a, c, g, or t
  misc_feature (764)..(764): n is a, c, g, or t
  misc_feature (771)..(771): n is a, c, g, or t
  misc_feature (774)..(774): n is a, c, g, or t
  misc_feature (782)..(783): n is a, c, g, or t
  misc_feature (805)..(805): n is a, c, g, or t
  misc_feature (816)..(816): n is a, c, g, or t
  misc_feature (839)..(839): n is a, c, g, or t
  misc_feature (895)..(895): n is a, c, g, or t
  misc_feature (902)..(902): n is a, c, g, or t
  misc_feature (948)..(948): n is a, c, g, or t
aaaaatgtggaggcgaaagctcggaagcattaaatcatttgaggtgacacaggcagtagggggcatgagaagcctgggaagtgcaaagttctttgggcaggcatcacctcctctccttggcatttgcatcctcactctccctgcagtatcactcagtgtgtcattttgtcaccaggcttgaagagggcctttttccatttgaggagacccngataagaaaaaggtcagtatttttgttcttttctccactccattctcctttcactacacgttttctctccttttcttcagagtctcttccaggcttcagcttccttcctctacagctctgatagatcagaggtggcaccttctaaacaatgtcaggctcggctccctgtgccatggggggtgcaggctgcatggttatgctttgcctgggcatgtgcagggtcaggagtctctcagaggctccagaaaagcagaagtcaaccccctaccatgcaaaattgagtctaagggttagatctgattaatccaactgagaacgtcaatgggtcacagcagaaaaaaaagttgaaatgttcattgtacatgaacccagcaaacccaganaccatcagggctgactttttggtatcggacgaagactcctctccactaaaaagaanttgggaaatttaatgngcaatttcagggantagtttntgaaagcagttgtgatgaatctgtaccaactgagccactgtagctattcctctntagtagacacacnngtctccctntctcttntcngattttcnnatctcttaaatcttccattctngttttcctatnaaacatccttgctagattagggnaaaccaacaagtaagtttccctgccacagagaaggcacctcatccttctctcttcnttgggangggtaacccctggatattcctcagtgctttttagggcataaaggtngtgtggcccctagtacaaagagattgaagacctctttttcttttcatagaga

SEQ ID NO: 481341 - DNA, 1000 bp, Homo Sapiens; identical to SEQ ID NO: 308251

SEQ ID NO: 481342 - DNA, 1000 bp, Homo Sapiens
tttttttttttttttgagacaggatctggctctttcacctggactggagtggagtggtgccatcatggctcacagcaccctcaacctccagggctcaggtgatcctcccacctcaacttcccaagtagcaggaccacaggtgcacaccaccgtgccctgctaatttttgtactttttatagagatggggtcctgccatgctgcccagcctggtctcgtctcgagttcctgacctcaagtgatcctcctgcctcagcctcccaaggtgctagaattacaggtgtgagccaccatgccctgcttttttgtctttgtgtttacctatattttctttctttttttttttttttgagacagggtctcactgtgtcacattggtgtgatcgtggctcactgtagcctcaacctcccctgcccaagctatcctcccacctcagtctcccgagtagctgtgaccacaggtgggcaccaccacacccagccaatgtttaatttttttgtagagatggaatttccctatgttgcccaggctggtctcaaactcccgggcccaggcaatcctcccgcctcaacctcccaaaatgctgggattacaggcatgagccaccacacctggcctgtattttctaatttccaaaataaacatgtattacttatatacacatttttaacttaaaaagttaacatcagtttcctgggaggaaataagccttaaagctgaggttgcaaagtggcaacccatagaccatattcagtgcagaaacatgccttgtttaatcccaccgtcaattcctaagagactgtattagggaagactcttggggaaaattgcagttaaaaatgcaaaaagcaaaggaccactgcatgggtggtccagtcacggaaggtgctccaagctcacaatcaatgtctgtaaggttaaggaggtggtctcgacttcccctcctgctgagtagcgggcagcatcggcaggagagtggccatgtaggatggcgacccag

SEQ ID NO: 481343 - DNA, 1000 bp, Homo Sapiens
tttttttttttttttgcttcatctgttgcaaaaaaaaaaaaaaaataaccgcagaaattccacaccactaacaaaaagtgctatttaaaaatgcttccataaaatgacatggccaagacagtcaaataaaataccaaataattaaattgaaaatgtacagttactattcccaatacttcaaggcaactggaaagtcaaggttctcagatgagggagttgaatttatccttgctcaaaattggttttaggggctactgtgcttgacggctggtaatttaaaaacaactgaacaaagccaacactcttatcagtggtaactctgctgtgatctactaaagacctttttttttcttcttattttatgatcgcttatgtaatttgagggcgacatgggtaatgggagataccccacaggacctgtaaatatttaaataatatttaacagctgatcagaggctaaattacaactgacattttgatgcagtttcgttagggaattaagacaatgcagccaatgaaatgtctctaggcagactgatttttttttttaatgcaataggataattgtctttgcgctgtgtgttttcacaagcactagttttgtgttttgtttctgtttttaaggggaatgacaatctctgtttggatatttatgaaaatggttacatatcaagacttaaaaagaccaggacatgaaagggaatgatttttttgaagtttccacttgtactgctgcaaaaataatgatgaatatatatataaatcttctgcagtgtgaaagtaagcaagggacaaattttaaggtcaggaaagactctcgaatctaagcatagtgtgtgtagtctggaaggcatctgaacgtgtcctatcctgaggctgcaatctcaagcctgcagctatcaggaaagacccacggtgcaggaagcagggctgcactgggtcctgtggccagcatgctctctctgagataaaatgtccctctggggctccacattgattt

SEQ ID NO: 481344 - DNA, 1000 bp, Homo Sapiens
aagagacaggagtgagactggtagcccttggttgatgaggcaaaagttgggaaagggcttggaatgtccaataaaaggttacccaaaggtcagatctcaaacctacctctgaccctggcctctgtcctgctcaaaccccctcccaaccttcccaccctcagattaaagtccaggcttctcagcctggagttcgcagaccttcaggccagccctgtccaaaagacctttctagactgatgcaaatgttctctgtactgcctaatacaatagccactgagcaattgaaatgcatggccagtgtgactatggaagtgaagtttacatttcatttcatttcattttaattaatttaaatagccacctgtacccagtggtgatcacactggacagcagagctgcaaggactgtgcctggctttctaaatctgcccccaaagcctctttgccaaaggcagcaatgctcttctgcctgcctcaggctgcttcccacctcctggcccatgctatggcctctgcctagagcaccatcccatcctctgccctgattccctcacaatcacctcaattcccacttaaatgtggtggagccttgaagggggtgcagggtttgggtaggttgcttaaaatgtcccttcctcccattctacctcctaaattaggtgatgtaaaaccacagtggtgacattcattatacagctacttctgaaaaccctggaggaaaggcactatccctggcctggggacgctgaggcttcaggagagagacaagcctcatgggtacccaggcctccagccacaaagggacagccaagatacaggtgtggctcagagggccagaaaaagttgaggggcagtgctgagggtcagattcccagttccctgcctcttgccaacacagggataaggggccaagcagaagagacaaagagttccttctctaccagatctctgacggaggtgcccagcattcttccccaggtcccagggagcctcttagagtt

SEQ ID NO: 481345 - DNA, 1000 bp, Homo Sapiens; identical to SEQ ID NO: 308254

SEQ ID NO: 481346 - DNA, 1000 bp, Homo Sapiens; identical to SEQ ID NO: 119921

SEQ ID NO: 481347 - DNA, 1000 bp, Homo Sapiens
cagtcactcaggaggcagtgaatgggcacggggccctggaggtggacatggctttggggtcgccagaaatggatgtgcggaagaagaagaagaaaaaaaatcagcagctgaaagaaccagaggcagcagggcctgtggggacagagcccacagtggagacactggagcctctgggagtgctgttcccgtccaccaccaagaagaggaagaagcccaaagggaaagaaaccttcgagccagaagacaagacagtgaagcaggaacagattaacactgagcctctagaagacacagtcctgtccccgaccaaaaagagaaagaggcaaaaggggacggaagggatggagccagaggagggggtgacagttgagtctcagccacaggtgaaggtggagccactggaggaagccatccctctgccccctacgaagaagaggaaaaaagaaaagggacagatggcaatgatggagccagggacggaggcgatggagccagtggagccggagatgaagcctctggagtccccaggggggaccatggcgcctcaacagccagaaggagcgaagcctcaggcccaggcagctctggcagctcccaaaaagaagacgaagaaagaaaaacagcaagatgccacagtggagccagagacagaggtggtggggcctgagctgccggatgaccttgagcctcaggcagctcccacatccaccaagaagaagaagaagaagaaagagagaggtcacacagtgactgagccaattcagccactagagcctgaactgccaggggagggacagcctgaagccagggcaactccgggatccaccaagaagaggaagaagcagagtcaggaaagccggatgccagagacagtgccccaagaggagatgccagggccgccactgaattcagagtctggggaggaggctcccacaggccgggacaagaagcggaagcagcagcagcagcagcctgtgtagtctgcccccgggaaactgag

SEQ ID NO: 481348 - DNA, 1000 bp, Homo Sapiens
  misc_feature (11)..(11): n is a, c, g, or t
  misc_feature (14)..(14): n is a, c, g, or t
  misc_feature (28)..(28): n is a, c, g, or t
  misc_feature (33)..(33): n is a, c, g, or t
  misc_feature (35)..(35): n is a, c, g, or t
  misc_feature (41)..(41): n is a, c, g, or t
  misc_feature (49)..(49): n is a, c, g, or t
  misc_feature (54)..(54): n is a, c, g, or t
  misc_feature (118)..(118): n is a, c, g, or t
  misc_feature (125)..(125): n is a, c, g, or t
  misc_feature (156)..(156): n is a, c, g, or t
  misc_feature (163)..(163): n is a, c, g, or t
  misc_feature (218)..(218): n is a, c, g, or t
  misc_feature (254)..(254): n is a, c, g, or t
  misc_feature (664)..(664): n is a, c, g, or t
  misc_feature (728)..(728): n is a, c, g, or t
  misc_feature (737)..(737): n is a, c, g, or t
  misc_feature (755)..(755): n is a, c, g, or t
  misc_feature (765)..(765): n is a, c, g, or t
  misc_feature (772)..(772): n is a, c, g, or t
  misc_feature (826)..(827): n is a, c, g, or t
  misc_feature (843)..(843): n is a, c, g, or t
  misc_feature (883)..(883): n is a, c, g, or t
  misc_feature (902)..(902): n is a, c, g, or t
  misc_feature (914)..(914): n is a, c, g, or t
  misc_feature (917)..(918): n is a, c, g, or t
  misc_feature (920)..(920): n is a, c, g, or t
  misc_feature (930)..(930): n is a, c, g, or t
  misc_feature (942)..(942): n is a, c, g, or t
  misc_feature (945)..(945): n is a, c, g, or t
  misc_feature (953)..(953): n is a, c, g, or t
  misc_feature (961)..(961): n is a, c, g, or t
aggagccaagntgngccatgcatgttanctggngngacagngcaggaantgttnttaaaaaaaaatggcagcagggtaaggaccttattggggggaaaaacaaccaacaacaacaacnaacaacnacaaaaacaggtttaccctcagagaagaggntccttantcctgagttttgggacactttgattctccttttgtgagaagcggaaaggcttcantcagctgcagccttccaggtccttagggcccaggantatttcacccacactgctgcccccatcccccgttctgggctccatctgtgtgctgaggatcccccatgcactcgacgagtctcagagggcagagaactaacctggaataaaaatgacactttctttcttctggccgagcagggtgttgttgatagagcaggacatgttcctcacagacttgtctctgatgatcacagccgtggtgaccatgaagaggccgtctgcatcaggcatggagacctctttcagggcaggcgcaaccccaccgtaggggtccctccacactgtgaggggctttgggtaccaccctctagatatgcactccagccggatgcccccgtcttcatggcccctcattgaaatgaggggcttagagcctagtcctgtggagagatatcagggttcacgcnaaagtcagtgccttttgcatctcttctgtgcctattgcatctcttctgtgaagctagaaagtanaggtaaaanagagggagataggaaacnatatttttgnttggaanaaaaaaaggatgaggggaaggaagaaagaacattgatgttggagaacaccatcnngccaatgggccacatnaactgtgagctctctaagaaggaaaggatccccattgcancccttttctttgcggtccnctattggccccntcnnanccaccaaccntctttctgtctnccntaaatgcntgtttcantttatcctcccaaataattttcccctttgagatgggtgt

SEQ ID NO: 481349 - DNA, 1000 bp, Homo Sapiens; identical to SEQ ID NO: 119922

SEQ ID NO: 481350 - DNA, 1000 bp, Homo Sapiens
attaattacaaacatttcagggtaattacacttaacactttattttgtatcagctgaccctcaccacaatgcagggaggtaggccatcatgccctctatttgttttccccctaaaggagaaggctgagaaacaagttttttgcaattatacaaatatttggtgaaattcagaccaaatctgagaggactactgatgagttcttttcactatagacattcattctatccaagaatggggaaaaaaggagaatggaggatttcttccttgctttaattggacaaatgagatagcaggatggctgacacaaaaatacccctaaaaatggtttgagaaagtatgaaaagtagcatttttatcccactgtgtaaactgcttacatcttaactatgcagcctatcttactgtatctaattgcatctgaagatagtttctgactaccttttaaaaagattggaaatgaatccatttcataattcacttatttataaacatggctttgtttcatacaaaagaagcctaaaagactatccaagaaccaattttttttaaaaaaaattgaaattacacattactgccagatacattttcccagataagactttttgatcaaaaagaaaaaaaaaagtcagtggctccccattgcttcctaactaaagctgaaactccttgctctagcactggacaccaactcactacctcttaatgttgccttaattacttaacttgacaaactcttagtcttgcattctctaacgtatcaccttgccacatactcgtaagagctcactcagcaggaagtgacctttccctcctctgagcctctatagcactcggcttacaactcacaaggcatttatcactgtattgtcttacctaccttactagacagaaagccaaggactatttatgggcacgtacacacacacacacacacacacgtatgaataatctttatcccttccattgtctagcataggagacactcaaaaatacttgctg

SEQ ID NO: 481351 - DNA, 1000 bp, Homo Sapiens; identical to SEQ ID NO: 119923

SEQ ID NO: 481352 - DNA, 1000 bp, Homo Sapiens
cctttcaggatcccaaagagatacacgggctcccctaaaaggcagagtcccagccacagcaactgctcttgtccttggcttcctccagagaaacagagatcggggagcagaagtcagatcatacatttaaagctacatgagggccgggcgcagtggctcatgcctgtaatcccagcactttgggaggccgagacgggcagatcacgaggtcaggagatggaaaccatcctggctaacaaggtgaaaccccgtctctactaaaaatacaaaaaattagccgggtgtggtggcgggcgcctgtagtcccagctacttgggaggctgaggcgagagaatggtgtgaacccaggaggcggagcttgcagtgagcctagattgcgccactgtactccagcctgggcgacagagcgagactccgtctcaaaaaaaaaaaaaaaaaaaaagctacatgaatgtccccattggaaataagacaggaaactcaaaactaggtgctgtagtcccagctatttaggaggataaggcaggaggatcactgtagcccaggagttcaagaccagcctgggcaacgtagcaagatcctgtctcttaaaaataataataataaatttaaaaaaaaaaaagcctgggtgcagtggctcatgcctattattccaacactttgggaggctgaggtgggaggatcacttgaggttaggagttcgagatcagcctggccatcatggtgaaacctcatctctattaaaaataaaaaaaattagccgggtgtggtggtgcacacctgtaatcccagctactcgggaggctgaggcaggagaatcgcttgaacctgggaagcagaggttgcactgagccgagatcgcaccactgcactccaccctgggtaacagagcgaggctctgtctcaaaaataaaaataaaaataaaaaaaataaaaagagagagacagaaaaggaaactcagggggccagggcttaaggggttgggaagatgcgagagt

SEQ ID NO: 481353 - DNA, 1000 bp, Homo Sapiens
cggccgaagggacccaggcagaggcggcagcggctacagcgcaaccgggccggggaggcagcatcgagctggagcgagaacagccgccttggcccgccctgattgccacctcttcccagccaatggcgagtcgagccgcagggggctggtcggtgctccccagttcttcaaccaatcagggacagaggagggaattcggatgctctcaatgctgctgcgctccagtgccttcccgcccccgcctggtgacaaggccttcatttgaggccataacaatgacagtggagaagccccagccgtgctccttgcatgaattctggagcagaggaaatgcagctcttgtggacccactaaatgtattattattcagagatctgccctcagtggttaacacaagcaaaagggaacagggcgtgtttgttgtgtgagcgtgtacgtgtgtactttgcaatggacagaccttaaaaggaatatcctctgttgctggcatcctcatgcttatctttgtctagcggaaaaacatttcctctgtggcttggtcccacaacagtttatggcaaatttaaagctggtaatattgagaaaaacatattttcacttctagtcaatgagactagttgagtgaagcaccaaaaattttcagtaatgtagtttggtggacgttatgttaaatccagtcctgccctttactaaactgtacaagatccagcgatattctaggcttgatccctgtgggacacctttccctacaccatgtccgggagccataattccagggagtttgtaaccctctagagcgggcctctgttgctgtttcttagcaacagacgaactggaaaatgaccagtacaaaatgcacagactttaactactctacctccagcttacattctaccaggcccttaggttagttaatgctctgagtcctgccatagagagaagatgagaggaacaggaagtggcagcttattaaagctgtttgtacctgaggtatatggac

SEQ ID NO: 481354 - DNA, 1000 bp, Homo Sapiens; identical to SEQ ID NO: 308260

SEQ ID NO: 481355 - DNA, 1000 bp, Homo Sapiens; identical to SEQ ID NO: 308261
  misc_feature (13)..(13): n is a, c, g, or t
  misc_feature (55)..(55): n is a, c, g, or t
  misc_feature (138)..(138): n is a, c, g, or t
  misc_feature (162)..(162): n is a, c, g, or t
  misc_feature (328)..(328): n is a, c, g, or t
  misc_feature (937)..(937): n is a, c, g, or t

SEQ ID NO: 481356 - DNA, 1000 bp, Homo Sapiens
ttttcttttttttttattgatcattcttgggtgtttctcgtagagggggatttggcagggtcacaggacaataggggagggaaggtcagcagataaacaagtgaacaaaggtctctggttttcctaggcagaggaccctgcggccttccgcagtgtttgtgtccctgggtacttgagattagggagtggtgatgactcttaaggagcatgctgccttcaagcatctgtttaacaaagcacatcttgcaccgcccttaatccattcaaccctgagtggatacagcacatgtttcagagagcacagggttgggggtaaggtcacagatcaacaggatcccaaggcagaagaatttttcttagtacagaacaaaatgaaaagtctcccacgtctacctctttctacacagacacggcaaccatccgatttctcaatcttttccccatctttcccccctttctattccacaaaaccgccattgtcatcatggcccgttctcaacgagctgttgggtacacctcccagatggggtggtggccgggcagaggggctcctcatttcccagtaggggcggccgggcagaggcgcccctccctcccggacagggcggctggcagggcggggggctgacccccccacctccctcccagatggggcggctggccgggcagaggggctcctcacttcccagtaggggcggccgggcagaggcgccccgcacctcccggacggggcggctggccgggcagggggctgacccccccacctccctcccggacgggtcggctggccgcgcggggggctgacccccccacctcccttccggacagggcggctggccgggcggggggctgacccccccacctccctcccggacggagcggctggccgggcagaagggctcctcacttcccagtaggggcggccgggcagaggcgcccctcatctcccggacagggcggctggccgggtgggggactgatccccccacctccctcccgg

SEQ ID NO: 481357 - DNA, 1000 bp, Homo Sapiens
gctgccacctaccctcctacagccaccccaacctcttatacctgctgttcccccacccccagcctcacagtagccttaggggaatctagagcaggcaaatggaaatgcagggctcattaggagccacctgggatctcctcccatggcgcccccaggacttcatgctctcagcctcctgcccccggcccctaagcctggagttacagactttattagatgcataaatcctgtctccagagctcaagaagcatcattagttgcagacgctttgtcagagccaggccctggggagccttagacgaacccctaatccctcaacaggttggagagcttgtttatcacttcccctctttcctaacctgtagactaaagcacaagaaactcatgtcaggaggggttaagtaggatgtcctggagtggaagaggagtgggaagagccagggtcagagtctgtgaggatgaccaggcctggtcctctgtgcctggggctggcagtcagggcaacacagcccatcctctgcttgtgtgcctcttggaggctactcagatttgcctgtggatagaaaaaatatattcaacttcatgatgatggagagaatttaactttttttctttttgagatggagtttcgctctttttgcccaggctggagtgcagtggcgcgatctcggctcactgcaacctctggctcctgggttcaagtgattctcctgcctcagcctcccaagtagctgggactacaggcgtcaaccaccatgcccagcctgtatctttttttttttaattaaaaaccattttttttttgccgggtgcagtgcctcacacctgtaaccccagcactttgggagaccaaggcgggtggatcacctgagggcaggagttcgagaccagcctggccaacatggtgaaaccctgtctactaaaaatacaaaaattagctgggcgtggtggtaggcacctgtaatcccagctactcaggaggctgaggcaggagaatcgc

SEQ ID NO: 481358 - DNA, 1000 bp, Homo Sapiens
gatccacagggactgaggcccagcatccccagatcagctggcaatgaatgcggagctctgccggggaatgccctcttcccctgtggattggcccggcttggctccttcatgcctggagcccagtgcttgtctctgcaggacgcctggagtgaccagaaggggcagatccacctggatccccagcaggactaccagctgctgcaggtgcagaggaccccagaaggcctgaccctgcttttcaagaggccctttggcacctgcgaccccaaggattacctcattgaggtaaggggtggccgcgagtacccaggagggcgtgggctgcgtgtatcatgctgccatcctgtgccaatgtcatagtacctttcctgtccctgataagtctggggcctgggcctggccagctatgacagagagaaagccaaggaggatggccagaggcagtggtggggccaaagcacttaggatggtccagctctgctattgcccctgagccctcaaagacgcagctctttgccaacacgtagctgacatggtttctagatgcggggcttgtgctgaagcctctcccattggactagaccttgcttctggatgtctctctcctcctggtcctgttaaccatcaggtgggattctggagcccaggcgacctggctttccatcccggccctgttgccagctcgctgtgaggctcgggacaactgcccccctcctctggacctcactttgcccatctgtaaaatggagatgggaactagatgatctgtatggcctgaccaactctgggagttcatgggagccataaaacattgcaaaagccataggcttcttatgctgctctaagagccccccaacctcttagggaaagcaacccaccttgcccttgaagacaaaactcttttaactctagcacacctgacagcttttgtcttgtgtaagtaatcctttggtgtggcagtggcctgggctggccgttagtgccaggtcttaatcatggg

SEQ ID NO: 481359 - DNA, 1000 bp, Homo Sapiens
gatctcagctcactgcaacctccacttcctgggttcaagtgattctcctgcctcagcctcccgagtagctgggactacaggcatgcgtcacgacacccaggttgttctttttgtatttttagtagagacggagttttgtcatgttggccaggctggtctcgaactcctgacctcaagtgatctgcccgcctcggcctcccaaagtgttgggattacaggtgtgagctgccacgcctggccttaaatgtgtgctttcattatgatcaacctttaagttctctataaaaaaactccatcctggtagtaaccataaccttgcttcattctagacatgagaatactgaggacaaacagaagagtaaagtgcttggagtccatttcccttttacagatgggctgagcacagatgggtgagcaacttgcccatggacaagagagtgagtgttcacaccatacagacatgctccaaatgtccagcctgctgcctcccctgctggggcccctggcaagggcccctgctgagtttctccaggctgatcaggtcactttgaccatagagagttttcttatagcaaaccaggctagtcctccttcctcttaactaatgggaaaagctggtccctgccccctgtgagtatcttgttctcttccaagcaggataattaaacatcacctgcttcatttcccaagggaccaggggctgtgtttgattcattaattaactgcgagtagtacctgctcccaccaggcacttgtctcatgataaacatcactcattatgtgcttaatgcgtgctagacacaaggctaaacacagtgcgagcattgcctcatttagtcttctcagcgatccgatgagatatggatactgtcattaccctgactttgcaggtgaaaactttaggctcaacagcagcagacctgaggcggatcggcctgattcccaagccattgctcctaatccccttcttctagaacttctacatccttcccaaccagcc

SEQ ID NO: 481360 - DNA, 1000 bp, Homo Sapiens; identical to SEQ ID NO: 308266

SEQ ID NO: 481361 - DNA, 1000 bp, Homo Sapiens; identical to SEQ ID NO: 308267

SEQ ID NO: 481362 - DNA, 1000 bp, Homo Sapiens; identical to SEQ ID NO: 308268

SEQ ID NO: 481363 - DNA, 1000 bp, Homo Sapiens
gatccacggtgcaaccatctccttcatccagcacgggtgtccctgtttcaaaagcccgatacttccctaatacacacctttcctaatacagctcaagcttaaaaccttcaaagggactctgaattctccccccaaaacccaccgtcttttcctggatgaccgcagtcaaggagtcctcccttctcaaccatgcacactgtccatgcagcccccacccaaccctctccacacacccactgcagtgctcctggcctggtctctgggtcatccgggctgtgcacactagcccagccagtcctttggagcctacctcagccaacacatttttgcctcagacttccatggaccctggcttctccctggggtgctgttcccccgaccccactgccaccacatccctccagcctcagcctcgagcgaatccctcagcgagtctccccagccctcctgtctccgcaagcccaccccacatccctcgcccagtttctttcacacctcgcattgccacgcacactcactcactcccgagcctgcttctggctctgtgcctgcctgcactaaaagctgtggggtcaggggccatcatccctctcttcactgtgccaaaaaacaggcctgatgcatcaacacggatcgctgaaggacgacctgccttcaagcacgctccatctggggcaaggcgggcatgcactcagatggcgatgcactgatgggggtccactgggacttacatttacacagagctcgctggtaccgccggccctgggtgtgcctcagcacgtgttctgggcacttgttgatgtgccgcagggtgagtttgcagaacaactggtgcctacagagcagagagaccaaatttgtagggacagttcacagcaaggattcagactggtggctgtgtcttggactcatccctggacagtctaccatgcggcttggacatcgggcttttaaaggctcccggagcaattccactctgaagctgggtggggaaccgtct

SEQ ID NO: 481364 - DNA, 1000 bp, Homo Sapiens; identical to SEQ ID NO: 308269

SEQ ID NO: 481365 - DNA, 1000 bp, Homo Sapiens; identical to SEQ ID NO: 308270

SEQ ID NO: 481366 - DNA, 1000 bp, Homo Sapiens; identical to SEQ ID NO: 308271

SEQ ID NO: 481367 - DNA, 1000 bp, Homo Sapiens
gatcgcttgagcccaggagtttgaggctgcaatgagccctgactacaccactgcactccagcctgaatgacagcgaacaaccctgtctcaaaacaaacaaacaaaaagcatatcctgcctgaggaggcagcggtggcaccatgcctctgcctctgctcataagcgtaggtggccgtgagagtttgaatgcttgggatatcccatggcctgaggtgtccagggcctggggcactgagtagggtggctacagtgggatcagcatgaggactgggcccagggcaggtcacagaggtgcccagagcaccactgaaagctttcctcagctactggattagaggcaccctctggccctgaagctctgtgccaaaagcaaggggccactgatcccagaaggggtcggtatcgtgagccccagtgacactcccctggaagctcccagggaagcagaacccaggagtctgtggctggctccagggctggggctgccaggcctgccaggccactcctgtgtgaccccaagcagccccactgtgagcaagtcctccactgtcactggcaggcggctggcctgggcaggacacagcctcccccgcctccatctctcctccatacacaggggtcagcgagatggggaggtggactctcacacctgcgtggcctgcacccccagctctgggctcatgctcacatactcagttttacacacacacacacacacacacacccctccaataatttggcctcaatcttggggctgaggcctgctgggccctgaggaatcttacagggaaaccctttctgggtcctgcttctccttttctccataaggatgcgtgactgctcctctctcttgagcagctcatggggggaggtgcatgtgcctgatttttgcattttcagcttttctgaagggaccacactgccaggatggtggtgggtcctgaggcagtagctccagaccacacccaagccacagcgtaactgtgggcaccagatggaa

SEQ ID NO: 481368 - DNA, 1000 bp, Homo Sapiens
gatcactcctggcctgtggttaccactgtccttgtcaccttctggcagggtcagctgtgactcctcctcccctctcttggcagtgctctgtttcctgtggggatggcatccagcgccggcgtgacacctgcctcggaccccaggcccaggcgcctgtgccagctgatttctgccagcacttgcccaagccggtgactgtgcgtggctgctgggctgggccctgtgtgggacagggtacgcccagcctggtgccccacgaagaagccgctgctccaggacggaccacagccacccctgctggtgcctccctggagtggtcccaggcccggggcctgctcttctccccggctccccagcctcggcggctcctgcccgggccccaggaaaactcagtgcagtccagttatgtcctgtcctccttcctgtcaggcagctgctgcaggaggggtgggcaaaggcatcttcctctgggaaggactggcacaagcacttggtccctgggttgtgtgcctgggaggccgggatcagggctggccctctttctccctggcaaagcaaaacctcccttttactactatcaaggggaagtaacttgaaggtaggaacccagcttgtgagccccctagcctctgggctgctctgcatgtgccccctcttgctggatcatctggtagcagccctgtgccctgagggtgatgctctgacctatgcagcccccctccctgtcctgagaaggcttccagctgggccttggaggacagggtccacccctacctcctggtctccttcctcagcttggaagccccggagcctgccctgctgggaatcggggaagcactgcttacctgtctcctgctcccttttcaggtgcctgtggcaggcagcaccttgagccaacaggaaccattgacatgcgaggcccagggcaggcagactgtgcagtggccattgggcggcccctcggggaggtggtgaccctccgcgtccttgagagttctct

SEQ ID NO: 481369 - DNA, 1000 bp, Homo Sapiens
gatctggtccatctctactgtggacaagcctgtcacacctggtgtctgatgtcagggccaccagccccccaggaaggagaggccagcccctccttggaggtgggcagggctgggaccctggcagaagtgtggcctgggcactctccacctgcagtggggctggtgcatccggggttgggcatggggagtggggggtcggggaggggctcacaggcgctgtatttgccaggctcctccgtcttccgcatcaggattttcttctggatgcaccgatcctccctcctggaaaacaggagacacgcgggcagcggctcccaggacacacctggcccatcctcagctcacctggtgcatggccctgacccggcaacctgaaaattccactgcccccccaccccaccgagcttcaggatgccctggctgtttccctccaaggcagggggtgactcttcccaacacccgaaatgtggatggggcaatgggcaccaggtgggtctggggcggggagcgaaagtggcctgaggggccctgcagtgggcaacactcacatgaaggtgaacgtggcttccaagttcccaccgcccagggctgtcaccttcactggggacaccttcctgggcctcctgtcctccggaaagtccttatcgaccaccatggccttcacgtaccaggtccctgtgatctggagcaggccaaggccgtgagcccaccatgggtggcccagattctactctgaccctggcactcaggcctgcagctataaccagacacccatggtgcccggctgccacccctaaaggcaggctgggttcctgcaccttagttagagctcagctggagtgagttagagccagccccctgctcagggctcccagcccccagtggaaggagggcatgtctgcaccccatggacccccgggccccagcaccaggtgagccctccctccacagggcccaaccctgcgagaccttcgggcttcaggcgtcagtgcagcaggaa

SEQ ID NO: 481370 - DNA, 1000 bp, Homo Sapiens; identical to SEQ ID NO: 308273

SEQ ID NO: 481371 - DNA, 1000 bp, Homo Sapiens; identical to SEQ ID NO: 308274

SEQ ID NO: 481372 - DNA, 1000 bp, Homo Sapiens; identical to SEQ ID NO: 308275

SEQ ID NO: 481373 - DNA, 1000 bp, Homo Sapiens; identical to SEQ ID NO: 119925

SEQ ID NO: 481374 - DNA, 1000 bp, Homo Sapiens; identical to SEQ ID NO: 308277

SEQ ID NO: 481375 - DNA, 1000 bp, Homo Sapiens; identical to SEQ ID NO: 308280

SEQ ID NO: 481376 - DNA, 1000 bp, Homo Sapiens
tttttttttttttttttggaagtagagacacaattcactgtgttggccaggctggtgtcgaactcctgggctcaagccattgcccacctcaaagtgctgggattacaagtgtgagccaccacacccaaccaggttatttgaacatttttaagtactgtattttctctattgtaatattgactgtcatctctgtgcaggttttttagtggttgctctaggttgaaacgctttgaattcttaggtatctaagagtgagcattttctttttttgactgctatactctcaccagttgccagcttctcatataaatattgtaaatgctctcgtttaggtaactcagcttctggagttgagggaacttcaaaatcagaagagctctgggaatctgcatttgtgctaagatttagcaaacttttttcctcgggtatatgtgtctcactgcttagagtagttggttctccagtactaggaactattgtcacatctttatctctgcttttcaaatcggagtaagtatcctttgggcaaattacattttgttccatgagagaggcaggaatattctctttgattgttggtctgtagtcagctttgtccaaggaagtaatatccccactgtttctctcttgggaagataccaaaacagtatcagattggctgtcccagccttgacttccttgttctgttatgtgtgttgactgggaagaattctgggaggagatgtgagttgattctccatcagagtcactgaaaagctttggtgactgagatccccctgccactgtggaggaagggaagttttccaaactctcatctgtgatttcatcatttcttttaaagaatacttcccactggggtacatccccatcagccttttgcaggtgaagtacagagcccagatctccttgcagtgaagctgggattcctacttcttcttcactttcactgttggattcttcacaatctacaaagtttgtgaaacgagagctctgcatacac

SEQ ID NO: 481377 - DNA, 1000 bp, Homo Sapiens
agaaagaggaggagatagccactggccaggcattccccttcacaacagtagagacctacacagtgaactttggggacttctgagatcagcgtcctaccaagaccccagcccaactcaagctacagcagcagcacttcccaagcctgctgaccacagtcacatcacccatcagcacatggaaggcccctggtatggacactgaaaggaagggctggtcctgcccctttgagggggtgcaaacatgactgggacctaagagccagaggctgtgtagaggctcctgctccacctgccagtctcgtaagagatggggttgctgcagtgttggagtaggggcagagggagggagccaaggtcactccaataaaacaagctcatggcacggactgctcacattctgaggtgtcagggatggggaggagggagaccggctggtgggtgcatgggctatggtcactgtgggcacccctgcaggagtcccatagccagagtgcccagggctcaaggctcgcatcagcaagtgctcaggctttatttacaatgccgacactgcagggaatgaacagcctccatctgggcctctctggtcaaaaccacttttttgagtcaggggcccagccccaggcctcccaggtcatcgtcctctgccccgaagcccgagaagctgatgggctggcaggccaggctgcgcaggttcacaaggcaggcggtctgcgtggcactgaagtcagggacagtcaccaacagcactgtctggtcctcaggacctgcaaagaagtcacataggacccactgtaggttccaagtaagtcctgcctcaaagagaagctgccagaaataaacaggagtccccattggcacacagtggggcagtgacaataggagaccagagattagccttgagaggcacacaggctgggagccgttccagtccctgcccagctggcgaggcagcttggctcccacagtgaaatggcagctgtgcagaagacctcagctg

SEQ ID NO: 481378 - DNA, 1000 bp, Homo Sapiens
tttttttttttttttttgagacagggttggccaggctggcctctttatctgtttttgtattgttttctcagaggcgctgagtgaagatggtcagatatgtgtgtatttttttaaaaacgatttgaaaaaatatgatgttcctttgtcgtgggaacaagccaggttgcagacgcagaaggagctacagctgagagagggacggtgaggttcatgttcagtatgtttctgttgcttgctaaactgtatttttcttgcaaagtaaatagaaattaacatcctacatgccaaatccagtccactgtgggcagactgtgacaaatcctcaaggaacagatcattcccatgcagtagaaactattctagaacaaagttaaagcatctcacttcatttatcaggcatacctgaccctgaaatcatacctaaccaggagagtacagctgacatttcatctcacttccaaatttggttccaaagcacagtacctaaaaaagttcacaagtatgctttctcccaggataaacaataacagtgaaaatctattaatgtaatttgttgccataatagaaaaataagtggtaattttagcaggcgttgaaatacgtttcttaaaatttatacctgttcctgataaaatttctttattttgggtactttctttagcttgggttaaaaaaaaaaaaagtcctaacttgataaggctacctaacataaaactaccaaaatagaaaaaaaacatgcttcttggtagaatgttaggaacagtggaatcagaaccagcctgttgtcccgactattattcactattgtcctggaaatcctgaccagtacagggatgtgggatagacaggcacaaatactgaaaggaaggagaaactgtcatttccagacagtacagttgtcagtccaagaaaagtcaagtccatagaaccattctcagttcaataaggtgatcagatagatagatccacaacatgttaaaaaaaaaaaaattctcattca

SEQ ID NO: 481379 - DNA, 1000 bp, Homo Sapiens
tctcaaggttgtttccagatgatgagagatgacgcccaggccatgctggcacaatgtgtagagtggaagtattggttctcttgccccttcttactgtcctccttggtctgttttttcagctgtcagtaatgaggaggacagtggtgggtgcttcatcctggacctgggcctacagtttccaccataatttacttgggaaatgcaggcacctgaagttgcttcgaatgagagatgggaggtgggggaacggaggaagcaaaataacaaacctagttcaacaaagaggaaacatgagaggctggaaggcccccccctccccccacctctcctcctttttctcttacccccaagatctgccctggctgcctcctgcttcccgctctgtacctgacggttctccagggccccagcggctgcccggtccccagctggtgccgctcctgtctcctgaatctgacccaggcccctcctgcaatctgaccaccacccctgcctccagctgcttcctctttgtctcctctcccaagatccacactcggatccacactgggcatgacacacagtgaccgctggcccatcccttcatctgcacccggtataaggtggccctgactctgctccctgccagctcaagtctctcaccagacatggtggggacagctgggctccctgggcttgcctctcacaggtccctctcagctttccagtctccatcctctcagcttcagttttccctgcctgggaaatcggagttgggaaacctaagagctccttttgtgttaggaacctgaggaattatgcggtccagagatgtcatcagctatcagctgtgaccaactgggggctgcctatagcgcagcattgcagaatctgaagctgcacccaggctctgcaggaggagagctgtgttcaattagaaatgtctgccgtgcatgggtgcaattgattagtaatgtctgccatgagtgtggctttatgaatgccaggaattgccatccct

SEQ ID NO: 481380 - DNA, 1000 bp, Homo Sapiens
gtagatgggacagtcagatttctcactgctcggctgtgtgcttcatctgctcttcccgcccttaaaacatccattgttcagaatgggggaagcccagcagtgttgctgggtggcatttgagagagggagtggagttgtcatgctataaacagatatagcattgatcctacagagcaaaaagatagggaaagggagggagaggaacccagttggacattatgtcatgccaaagagaattccaaggatggttaagaatggcaaccagaggcccttgaaactcccaggaggccagcagacttcactaggcagaaacccaagaaaaaagttacccccatttgtcgctaagaatggcggatgtcaaggggaatgggaacaaaggggaatttctagggtccttgtaagcttaaaagtcctattaagtgaagttacttgagatcagcctggaatatcttaatctggacttccccaacggccagttttaaatcttgtttacaactcaggtcagaattaaaatggaaaacagccttcgatgacttccagacaaggaactttggaaaaaattaattttacagtaacatcaaaatgtctgttatagcttgtgcaacaaagctatacaaaaaatctgtacaaaaaataaaaaaattaactgggcgtggtggtgggcgcctgtaatcccagctacttgggaggctgaggcaggaggattgcttgagcccaggagtgtgaggctgcagcaagctgggattgtgccactgcactccaacctgggggacacagcaagaccctgtttctaaacaaaacacacaaaaaagtgttcattaggcccttgtcttctgcacacccatcactctcgggaaagaagctggtctgagctaaggtccaagagcagctgggcctagggcctggcaattcatttcagcagtacggagactgtcacatcccattcccaggctctgcttctccagactccagcaaaggtagttgtggcctgtgtctcaga

SEQ ID NO: 481381 - DNA, 1000 bp, Homo Sapiens; identical to SEQ ID NO: 308281

SEQ ID NO: 481382 - DNA, 1000 bp, Homo Sapiens
gccaagaagggtggatcacctgaggccaggagtttgagaccagcctggccaacatggcgaaaccctgtctttaccaaaaataaaaacatctgccctgtgtgcacgcttataatcccagctactcaggaggctgaggcatgagaatcacttgaacccgggaggaggcggaggttgcagtgagccaagatcccaccactgcactccagcctctgtctcaaaaacaaaaacaaaaataaagtattaacaatttttagttgtgagaagatataaacgtttccatcttaaccattttacgtgtacagttcagtcatgtcaagtacattgacatcgtcatgcaaccctcaccaccatccatctccagaacccttttcatcttgcacagctgaaaccctgtgctcattaaatagctccctattccatccctccccacagccactggcagccaccatcctactttttgtctctatgaatttgactgctctgagtacctcatctgactggaatcggagagtatttgtctttttgtgactggctcatgataaacactttttagatgactggttggaattaggagcaggtggcaccacaactggcccaggcctctcatctcctttttctcctttttccctattccaccagtacaacagctgtgaacacatgggtctcatctttgcggtccctaacacagtggttctcaaccttgtttacatgttagaatcacctgggaaagttttcaaactactcttgcctggaccacattccagtctaattatatcagaatctcagggagtgagggctcacgtatgcatcgtttagaaaacatcctaggcatctcaaatttgcaggagaaattgccgtccacaccaagttgatgagctgaaatgtagactaacagtgggtaaatcagagtttaaagtagatggtctttaaggtctttttatattctaaaatgtgcaaagtcagctagtatctaattctcaaccagcagtggttgagtgga

SEQ ID NO: 481383 - DNA, 1000 bp, Homo Sapiens
gatcaaaggaggctccatcaaaagagggtgctggagtgtcttgtgttacattggcagttaaatacttgtgcctgacagtaacaacacatgtgacttctgctcttatttcactggccaaagcaagccagttaggcctcttgcagtggcctaacttcaggagggctgaggaattccatcctatcatgtgcctggaaggcagaaaacgggaaaattcatgaagagcctcaatggctgcctcaactcggtgtagcgctgactggctcacatatctctctcccactggacagtgggggaaccaaacgtgtcacagcgttcctaccctttagcagtttgtgctccaggaatgtggagagaccagtatatggatggattataactctgtgttaatgttacagtctgggtttgctggcgtggaaggagtttgtggaagaagggcagtagtttatagggagaggaggatggaaagggatgatcttaattttggtgaccctgacagcagagcttgagacaggacttggccataggtagttaatttaggtgatcccagaaagcagaagcgaggctatagggagtgtgagatcctgaaggaggaaaggccagtttaagagaatgatgttggccgggtatggtggctcacgcctgtaatcccagcactttgggaggctgaggtgggtggatcacctgaggtcaggagttcgagaccagcctggccaacacgacgaaaccctgtctctactaaaattgcaaaaattagcctggcgtggtggcatgtgcctgtcatcccagctatttgggaggctgaggcaggagaattgcttgaacctgggaggcggaggttgcggtgagcagagattgcaccattgcactccagcctgggcaacagagtgagactccgtctcaaaaaaaaaaaaaaaaaaaagagtgatgtcactgttgtgtgcagtggagttcgattcccccaggccctcctgaggagagagctgaatgtctccagacgctt

SEQ ID NO: 481384 - DNA, 1000 bp, Homo Sapiens
tcaacagttagccgaagattcattcgatgagtccgatttttctgaaagagatgattctgatgattcagatgattctgatgttagttctgtttagaaataactccaagaatagtttttatattttattttcacattgaaaatcagtaagatttgcttcagcctccaagagtgtgtttacgtaaaattaaatgagcgctggcagtgagctgcactttttttttctaaatgggaaaagggttaaactctgcttcttacaataaagctttgtaattttctccaaaaaggtcttgcatatttttattagatttatttctagaaactttatatttttagttatgattaaatattatatatatttaaaattccattttcttttttaaaatttatttttatagagacagggtcttacactatgttgcccaggctggtcttgaactcctaggactcaagcaatcctccctccttggcctcccaaagtgctgggattacagttgtgagccactgcactcagcctaaaattctattttttaattctgttgctggtacttagaaaaacttaaatgttgatgttttagctcgcaaatttgctaaactcttaattctaataatctgcttatagatgatattggatttccatacatacaatcatctaacctttaaagaatgacagttttgtttcttccatatgcctttttttcatgctttttcattttccttgctttactgtgttgacactttcagtacaatgttgaatacaagtagtaatagcaggcactcttgttcttgattttaaaagagacacttctaatatttcactattaactaatgtttactgagggatttttgtatataccttttatcaattcaagggactcagctaggcaaggtggcacacacctgtaatcacagctactttggaggctgaggtggaggctcactggaacccaggagttcgaggctgcagtgagttatgatgccactgcactccagcctgggcaac

SEQ ID NO: 481385 - DNA, 1000 bp, Homo Sapiens
aagcttgacgcatctgacacccacttcttgttattttcctgtgctgataacaagtccagaggccccaaacccattcacttttccccactgctctgctctcccccaggttcccatcttcatgcctacagtcagctactattttttataatctacaagttaactacttgagaggctttaggggtacaaggaacaagatagggcctctggctcaaaaatctaacatcccaggaggagataggagggccagccatgcgtggtttgaggttggtattaatgtcatgctgtggatctaatccagcttaaattctgcccagactggtaattaagatttaggacttaacgctgatgcccttctctgacctcacacaggtccaaaggatcagaagcatctgggactctgaagccacctccaaattttcccttacgcaggcctaccctcgtggactcttcccagcagaacttgccagcaggagtgaagggactcagcacagggctgacggccattccctcacttctggctgggggaggacagagcctggagaatgcaggatgagaaggaggcccttcaataaatggagcgctaatgatgctggagatctgtgaggtcaggtttgggagggcttcacccagcttcacaacccggagagcctcagacacgctgtcttcagcttttggcttgctggagatttgactttttttttttttttttttttttgagacagagtctcgctctgtcgcctaggctggagtgcagtggtgccatctcggctcactgcaacctccacctcccaggttcaagtgattctcctgcctcagcctcccaagtgcctgggactacaggcgcccaccaccatacccagctaatttttatatttttagtggagacggggttttgccatgttggtcaggctggtcttgaactcctgacctcaggtgatccacctgcctcagcctcccaaagtgctgggattacaggtgtgagccaccacgcctggcgaga

SEQ ID NO: 481386 - DNA, 1000 bp, Homo Sapiens
ctggaagacaagctgctgggctgccaattgctgttgctgctgctgctgctgctgctgctctttcgcttgctttccaggatgctgttgctgctgctgctgctgttgctgctgctgctgctgttgttgctgctgttgttgttgttgttgctgctgctgttgttgctgctgttgttgctgctgctgctgttgctgctgctgctgcaaaagctgaagatgtaactgctcttgctgtttcttgtaaaactcttgtagttgttgctgaataaaccattttgaatttttttccaaggcagctctgaaattttccaatccagaatccaaaaaatcctgctgcagcatgacagcctgctgttgttggagaagggcttgtagctgctgaggagacaggacttgttgctgaaggatctgctgcatttgctgaggggtgatcacctggggagtcatcatggccactgacacaggcaccttaaatttacgtctctgctctgcacagctgttgaagaaccacaagtctgtctcatggctgcagtggtctctgtttatcactgctcttaggagatttcaatccacttgtttgctgctgtaaaagaagttgtcttgctgcctggagagcctgcagggtaattgctgagctccaaccccagggtttctgattcagtaggtctagggagtggcctgagaatgtgcatttctaacaagttcccggtgatgctgttgctgctggtccaggactcacacttttgagaatcgctcttctaggtcatcagttaagtatagatccaaagactttaacaaataacctgggtgtaagagacaacatcctcctgtagtcctagctacttcagaggctgaggtcggaggactgcttgagcccaggagttccaggttgcagtgagttatgattgcaccactgcactccagcctgctgttgttgcagatgcagcagttctactgtgcttacttcagagctggtgtcaccacttgatcttccatctctgct

SEQ ID NO: 481387 - DNA, 1000 bp, Homo Sapiens; identical to SEQ ID NO: 308282

SEQ ID NO: 481388 - DNA, 1000 bp, Homo Sapiens; identical to SEQ ID NO: 308283

SEQ ID NO: 481389 - DNA, 1000 bp, Homo Sapiens; identical to SEQ ID NO: 308284

SEQ ID NO: 481390 - DNA, 1000 bp, Homo Sapiens
gatctcattgttcaattcccacctatgagtgagaatatgcggtgtttggtttgttgttcttgtgatagtttactgagaatgatgatttccaatttcatccatgtccctacaaaggacatgaactcatcattttttatggctgcatagtattccatggtgtataggtgccacattttcttaatccagtctatcattgttggacatttgggttggttccaagtctttgctattgtgaataatgccgcaataaacatacaaacccatgtggactccaggagccctgcacacacccctagcgtctactcccgcctgcctttggcaatgcctccaggtggaaattcccctgcctgcctccctcctcctgcatacagacatatttcctttgggtaggccccaagtacaaatatttggtgaacatccaattctgtctttccccatgtggggaggctctggtgatggcaagagcagggttccacaattcctctggggctcaccaccactgggaagggctggctctccccagggcatgccttcaggctgcccatattcccatgctgggtgtctcctcggaggtgtcccctgcagagccaggaaaacaggccacgtcccagcctggcggagggcaccaccccctgcctgcattccagggccgtctgcaggctccatcttcacgcaaacgtatgaatttaataaatgtgttttcttttaatcccaccttagtaaaaactcctaaacacacaccacaatctacatgattcaaattctgttaacattttaaactataaaacgaaaataaaacaaaaagttaatgctattgcctgtcttacaggaaggttccaagaatcatgctgtttaccttcaatttaaaaaatgcttggaaatataattgtgtgaatgctggtctgtttccaccacgtggttctcactgtctccaagaacagcccaagactcatgtgtcagccctttaatgactgattttcagaatctcatcctgttattt

SEQ ID NO: 481391 - DNA, 1000 bp, Homo Sapiens
  misc_feature (385)..(385): n is a, c, g, or t
  misc_feature (595)..(595): n is a, c, g, or t
tttttttttttttttttttttttttttcatttctaaaatttctacattcaatcagggtttaaccggtgaactagttgacggaacaagcagggattaaaaaaaaaaaaattcctcctctttgtgagtccttggagccccagagccagaaaatgtgacttcagaatatgtgtggacttgtcagcagctcagctgcacacaattatggggtcagagcccagattggaggtctggagaaactctgaaattgggaattaggacaaaatttttttctttttaacaccgtaatgccacatattaatttaaatgattctctcagaatgattctgtggcccagtttaaatgaagttcaaggaaatgaatttcagcctttgacactatgagtccnatttgaaagtagtcggctttacaagattaaaaacaaattacagggaataggaaatctttgattagcaggtgctttgatagctgcaagaatattttttctcaaaaatgtgaacacacatgggagaggcaccactattattatctttgtgtggaaggccttataatgaggattccattgtgtccggagactgaggacatgaattgctatgtntgaagggtcctggttcaagaggtgatttcagtaagacacagctgatacatagaacctaaggtttcatgggttcataaactctcttttttttgctaacctcccataatcagttgaagaatttaagggactcacccctttctgtaggattcccttcataactaatgggaggcagaacttttcaacagagaaagagaatgctcgacatttttcaataccatgtgcatcaaccaatgggagaaaagggtcttggaagtttagacagagtctttggtcagctctgagctcaggaagactgaagtccatgtccaggttgccccattcactcattgtatgaccttgggcaagatacgtcaattctaaggagttcagttttctcgtctatactgtgggcatttcaagggtcac

SEQ ID NO: 481392 - DNA, 1000 bp, Homo Sapiens; identical to SEQ ID NO: 308285

SEQ ID NO: 481393 - DNA, 1000 bp, Homo Sapiens
cccagaagacagcaccagaagccccagacccatcaaaaaacccacagacaccagaactggccgctcatcttatttttttacaaaataaagctcttcccttcctcctccatgttccctgcactccagttccgaccccagagcaggagggaagacggcagggcgcccactacatggcatgttcctgctcctggggcaccacactgccccgctgtgaggactccagcccgccccagaagccgaggtttctcctgagcgaggtgagcacctgtacctggaggttggagacaggggcagggctacggcgcagggctgcggtagccatggtgcggttcagcagcggattgggtggcgtgctgctgggcgggtgtgtggccttccaataggcttccaagtactccgccagatgctcgcaggcatcctccaattggttctcatccaggatgatgtcaaacatttcctgtgaaggcggggttagggggcagggctgggatgagtgggcatggccaagggggttgagggtgtggcctgggtgcagtgggtagagtcaagggattgaaggacaaggttaaaaagaggcctctggatgtagaagggaaggagagctctcagatctacagattggcagaactgcaagaagttttggcactcagtccaactccctcattctagagataaggcaaccaaggctgggagacagggcttgactctccacgcagaagggtgcttctggggcttgaaccagtctttgactgacgggacctgcgctcttcccagaagaccagtctgcacccacaggcctgacccaggtgttcctggtcaccctgtctctcatgtaggccagaggaaaccaggacaacccaaatgttctccctccattcccttctctgggatctaggcactcacaggggggcactgtgccagcttttccgaggccgctatttggacattgaggtgtttggactgagactttcctcgggacttgatgagcctttgaagtacc

SEQ ID NO: 481394 - DNA, 1000 bp, Homo Sapiens
catggagaagtagagatcagctaggaggctgatgtggctggacggaagtgagagagagaggagaggaggtgcaatgagagatataccaaggaaagaaaacatggggcgctgggcacggtggctcacgcttgtaatcccagcactttgggaggccaaggcgggcggatcacccgaggtcaggagttagagaccagcccggccaacacggtggaacaccgtctctattaaaaatacaaaaattagtgggtcatggtggtacatgtaatcccagctactcgggaggctgaggcaggagaaacgcttgagcctgggaggcagaggctgcagtgagccgagatcgcgccactgcaatccagcctgggcaacaaagcgagactccgtctcaaaaaaaaaaaaaaagaaagaaaaaagaaagaaagaaagaaaaaggaaaaatggggaatttcattggaaggccatgccaaaacacaaacaaaaaagaaacaaataaaggaaaaatggggaaggattcctcaggaagttaaagagttgacaattcaatttcagggaccccgggatttgagtctagctccttcgtgggcaaggggacgtgctgaccaatgcacacctgtgcctgccaggctccttgtcagttacctgttgccagttaagctgtctaacaaaggccaggcacagtggctcatgcctgtaatcccagcactttgagaggccaggcaggtggatcacttgaggccacaagtttgagaccaacctggccaacatggcaaaacctcgtctctactaaaaatacaaaaattagtcagtcgtggtggcgggtgtctgtaatcccacctactcgggaggccgaggcaggagaatcgcttgaacccgggagggaggcagaggttgcagtgagccaagattgcaccactgcattccagcctgggccacaaagtgagactgagacaaaaaaaaaaaaaaaaaaaaaaaaaaagctgcctaacaacgcccaaatccagca

SEQ ID NO: 481395 - DNA, 1000 bp, Homo Sapiens
gctcaggacaagaccttctccccggtccccagccaggaaattccaggggagaggagtatgcgggagcccccacatccactgtctccccgggcctggggccttatcactgcccaagcccagctggttaatgtctggcgtggagctcctgggaagtggggaggagagcagagggtgggaatctgccccgggattgacacgcaattggcaaaagacggcaaaggaatctcaggcccagactcctggggctaatggaggaggaggctgggggctggactcctgagtctgagacggggcggggttgggaggtggtggggggaactgtgggcttagtactcaggcgcctggggctggggggagaggtggctggggtcgcaagtcctgggtctgagggaggaggggccggatgcctggactcctgggtctgaagggaggaggggctgggggcctggactgctaggtccaaaggaggaggcagctggaaactgggactcctgtgaccaaggcggccgcgttgaacgagccaggcctggcttccaaggtcccggcacgcgagtgcaaggcaggatcccccggcccctcctctgccgcccggcgccgccccgcccccgcccccgacccgggccctgcggagcgtgagcagctagcacccggcgggccagcgagcgtccctgcagccagcgagcaggaggaggagctgctgccgggcggagggcagccgcgggagccgaagagggcgccccaggtaagatctccactcctcctccctcgggattccggcgtcctggtcgccctgccctcgggtggggagggacgggggcggggccgaccggggcggggcttggcggaggaaactgaggcaagagggaagtgtcccagatatgcagccggtttcccctgaggggtctcggagtccggaacccccaacccaaatctggaggatgaggaacccggagtctgcatttcttagtatccgagaaggaggggcctgaattccagaact

SEQ ID NO: 481396 - DNA, 1000 bp, Homo Sapiens; identical to SEQ ID NO: 308287

SEQ ID NO: 481397 - DNA, 1000 bp, Homo Sapiens; identical to SEQ ID NO: 308288

SEQ ID NO: 481398 - DNA, 1000 bp, Homo Sapiens; identical to SEQ ID NO: 308289

SEQ ID NO: 481399 - DNA, 1000 bp, Homo Sapiens; identical to SEQ ID NO: 308290

SEQ ID NO: 481400 - DNA, 1000 bp, Homo Sapiens; identical to SEQ ID NO: 308291

SEQ ID NO: 481401 - DNA, 1000 bp, Homo Sapiens
ttttttttttttaagtgaagcaaatattttatttaaatcagtcgtcaaatcacaacttatccaaatgaatgtgttgcaacattgttcttaaaggaatggcacaaatatggcacaaacacaatccagtatctatcaaaataccatttgtaaagaacctgacttatttcatgccatgtgtgaatgcagtccagcatataagagtagaatcaaaaacttacaacaattcttttcttcataacatataaaacatattcactactttgcctcaggattaagcacacttatcggtccaaacaaccataacaagtaggaaaaaggatgtaaagttaatttgctaccagaatataacttctttctaacctccactgggttagaaagcaaaatttcccaatgacaatagaacattctgtatgtttcaaaatgctttttagttttggcacactccgtgtaataggaaagtgaccaatttcagagtaccactaaatatggacctcaatcattagtgaattttaaagaattgtaccttgatcaggaatgttacatctaggaggctctgttttttgtgggttatataactgaggcttaaagctccccaagcctgcactatggcacatgccccatcatatactgtgtgatacaaaaagcatgtagtatcctgcacatttccttaaacattaagaaaaaaatatacaatagatacaggaggactacttaaaacatacatataaatatgtaaagaatgatactccagtttcagaagcagaactaggtattgccaactccagttccaggttaagaatttaggaccttaaatcagaatttatatggttatcaagggaaaattgtaggttggtcttggaaagaggaaatgttaaatggctctagctcctgatgaagcctcaggattgtcaggggctctctagaaatgagatcagttgatgtgcctgctctccaattctcaaagttctgaaatactggtcttcagtctcagcagcagcat

SEQ ID NO: 481402 - DNA, 281 bp, Homo Sapiens
gcctctttagagacacaaccatggcatatggaggttcccaggctagggatcaaatcagagctacagctgccagtacttagatttatcatgccttgaaaatggaccatttaaaattttttctcacgtcagaaatatatcaagttagcataagaaatgtgaaaagcgccaggcgcagtggctcatgcctgtaatcccagcactctgggaggccgaggcaggcggatcacaaggtcaggagatcgagaccatcctggctaacacagtgaaaccccgtctctact

SEQ ID NO: 481403 - DNA, 1000 bp, Homo Sapiens
ttttttaattgaattcatgtttaataattacaggcaccgtgcccccccttccccctgcccaggcaacagcaggggtggtacaggggctggggcatatgcccagcagcgaggacggcagtccgagagtgattttcagaaaataaaaaaaaggaccccaggggcaggcgttggtgcccctccccaccccaagacacaccaaatttcaaaattttcaagactttatatataatatatctctgtgccccaggggaggagagggacacctggcggcatcctggaggggggcccaggcagccccaagccatcctgcctcttcagccactttattagttcagacacatcacactacaggcacccactgccaccgccgctgctgccgcccccctgcagtccaggcggctagccggagccatctgtgtgtccatggggctccaggtccccggccccaccagccctcagttgtggtcagactcctcctctgcttcacggagccacttgaagaaggctgtgacagatttaagggccacacccttgccctgctgctcagcggggtccttgctactctcccaactgtagaaggcatcctccttcaccacgtcctcgtcatacagtgcgtcaaagaacatccgcagcaggttgggaggctgttctaaggtcactacaagggcctggagggcgtagagcgcctgtagctccttctgctcgtcacacaggtatttctgcagcagcttcgctcgcgctttcagcactgcaacgtccactcggaggggagtctcaaaaataattgcagaatagcagacagccgtcatgagggctcgaactaacgtgttggatactatctgctgctcactcaggttggcctctatccagtcgaacacccgctggttactgctgccctccttcagcagcttctccagctgcctgttcagctcctcggaggggagtgccctctggccaggggcttccgactcctctcccagggtatactccaccttctgtt

SEQ ID NO: 481404 - DNA, 1000 bp, Homo Sapiens; identical to SEQ ID NO: 119927

SEQ ID NO: 481405 - DNA, 1000 bp, Homo Sapiens
aattcattataaataacattttaaaacatgtagcaatttaatccacaaaaacattcagtcaatcaataacaaaatcaaccttaatatttaatcttggtattcatgaactttttgtttaaatctcttaaatgctgtaagacctgttttccacttgtaagaggcatgaaatataagcacttttttgttaacaactggatttcatttctgcttaagacagtctttggtcaggcacggtggctcacacttgtaatctcggtgctttgggaggccaaggtgggacaatggcttgaggccaggtgttcaagaccagcctaagcaacacagtgagaccctatgtctacaaaaaaaatttaaaaattagctaggcatggggtggcacctgcctgtagccccaactactcaagaggctgaggtgggaggacaacttgagctttggaggtcaaggctgcactgagctgtgatggcaccacgtctttgtcctactatttcccttattcaccatttattctcatcctaagtatctcataataaaaaatatattccatttagacttgactccacactgattagctggtgactgacctctctgagcctaactcctaacatgccaaaccaagataataccatctttgcctggcaccaagaaaactttttaaaaacaacacaaattatgtacatcaaaatgttctttagatgtaatatactgtgtgcattatgtacagcattcccatccaggcatatttatatgaggtccccgcatttaccgtaagtgcggagacaggcactgcttgaacatcacctccataatcttcacataccacatcgtaagccagcagctcttttttcactttctcaggatcagcctcagctttgtcacatttatttacggcaaggataataggaactgaaagaaatggagttaaaaagagtgaaaatgatgacaccttcaattccaggtattcacagtgaaagacatcaactttctgttctggttttctct

SEQ ID NO: 481406 - DNA, 1000 bp, Homo Sapiens; identical to SEQ ID NO: 119928

SEQ ID NO: 481407 - DNA, 1000 bp, Homo Sapiens
atgttgaaaccctaacctccaatacaatggtattaggagttgtggcccttgggaggtgattaagtcaggagggctgccgtctattagccaggaagtgggccctcaccagacaccaaatctgctcgcaccttgatcttggacttctcaacctccaaaactgtgagaaataaatttctgttgtttacaagccaccctagttatggtattttgttgtagcagcccaaaaagactaagacacatgccttttctatgactttgaataactctacacatgatagttactcattccttgaacttgtctgacacaattttgtctaaaccttgcttttgttattttgttgtgcagaaattataatgtaattaagcctactcacctttactcttgcaagtcttttggtaatgaacaagagagagttcatcccatcttcatttattctgcaaatattcattaaatgcctgctttgaggtactggaaatacagctgggaccaaaataatctctctgacctcatgggtcttccatttgggtgggaaacataaattgaaaatcaacaagcaaatctatactggaaggtctggtggtgataaaagctacaatggtacaaagcagggtgaggggacagagaggaaggaaggtcctctctggggaccttccctctgggaaggtcacatttgaacagagacctgaaaggtggagtcaccagccgtgctgattttcctgccattggagtttttttttttttaattgaactcatttatctatctggattttatttttggtatatgatatgaaagaggctctgggtacattttattcagtttgtctacaattcttttaatgcccttccttctattttcagacatgttgttatgaagttgggtctaattctcagttcactaatacattccaatgtgtgtatttttaattgctattttttggatagccctttccaaaaaagttcaccaattcttgctgattcttctgctttagcactaaatta

SEQ ID NO: 481408 - DNA, 1000 bp, Homo Sapiens
tgcttgctgatccccagagtataaataatcccctggtgaactggcagtaacccttgggggttagcgccaagattctcaccccaaagcccaaggaaggaggcaggcaaaatggatagaagggcttttatttacaggaaaggaggacagatgaggatttaagtgtccagtgctcccagcgctagttggtaaagggaaatgcagtgttatctcttcttttgctggcgacctgtaaaggagcaatattaaacataagtgtttgttccagctcctgctttctgcaaaggcactcttctcctttccagtcccttagccaaactcataaattggtagtgtcttaggccaccttacaggcccatcccacattaacaaaacaaaacaagaaaccacaccacaaataaaattacgatacctctaaacaagtatgattatctctggcatcctttctacctctctactggtccatatttggggcagggggagttttctgtttactttctgatcactcttgggatttgaaattctcatatgaatagctctttggtagcaccctgggctgttagtcattaggtctgctttcaggaggatccaccaatttctgcacttccctgaccactccacacatcatgtctgcagttactcacgtagttcattgtttcgggtcatggcctgggctgcccgagctcgtggcccctgctgtgtaaagtggtagccaaagcggacaatagagggacactgctctagcacggtggccatctccatctccactgcatcaccaggccactggcgctgggggagggagaggcaaaagctgacagtcaccctctctgggctgtttaccatcccacatcacagacccctttgggaggtcaaagaagcttgtttctccacagtgggtgaagagagatgctgacttggcttccctcacagagacaatgaagaggagaattcaagcaagattaagtaagatagctgccccactggctggctcagggaggagact

SEQ ID NO: 481409 - DNA, 1000 bp, Homo Sapiens; identical to SEQ ID NO: 308294
  misc_feature (5)..(5): n is a, c, g, or t
  misc_feature (20)..(20): n is a, c, g, or t

SEQ ID NO: 481410 - DNA, 1000 bp, Homo Sapiens; identical to SEQ ID NO: 308295

SEQ ID NO: 481411 - DNA, 1000 bp, Homo Sapiens; identical to SEQ ID NO: 308296

SEQ ID NO: 481412 - DNA, 1000 bp, Homo Sapiens
gcctggtgcttggcccacccttaggtggggcattcccattaagcaatgctatttgctgcctggcacgttctggggtttcacagattaagggtagaaacaatccccccaaagtctcttgggaccttgcactgtgaagattaaccatatctgtagtcagaatgagaccagacacgcaatacacaaatagagaaggcatctgcatttttaatcgagtattactattagcccttgggtaagtatatttgtggtagagttttaatttggaagacaaaagtgcccataagaaagtcaagaatttcaaatgcaacttttaatactacatatttcaagagctcccatgttcagtattcctggagaaggaaagctctttttgtttctaagtatgagaaattgttagcgttccttcctttggtcttcccacacccctcaccacaagaggcaaacaaaaaaaactaaaaaggggacaataagtgcaagataaaaaagaaaatctaaatagtatgaaattagtttttatttttaactaaaaataaatgcttaacatctttccaaaatcaaaactaaagacgaacacttagaaaaaagggtggaagtgtatttttccttccctggggaaaccagtaaggcagacattctaacgaagcttggttttttccataggactagtctatgcaacagaatctctctccagccttttctctatgtcagttttatctacctggcaagaaaaaacaaaaacaaccccaaaacaacccctccccacagacacaacacaaaacaagggacttgagaagttagagaaaacctttaacacgtttctgtaaaatcctttctgaggtggtttagtacaggtactacccatcagcaacttagcggccaggtgagttggtgcagaagcgcttcgggtgaattcataccagagccaccgggtgtgactcggctacctctcccaattaccacagggaggtcttaaaattgaatttcagtttcagcagatact

SEQ ID NO: 481413 - DNA, 1000 bp, Homo Sapiens; identical to SEQ ID NO: 308297

SEQ ID NO: 481414 - DNA, 1000 bp, Homo Sapiens
gaatagtaacgctcgccttcccaactcacagagttgttgtgaggatcaaagtgatcaggcttgtgcataagaattgctgtgacaccccatacaaatgtgaatcatattgcttttattacatgcaggaaaaaacgtgatccatgtttggtgaaaagttcaatgaatgaatggatgagcccagcttgctaatcaccttattttaatacaagactaaatgcaggaacagcttcatctatcatattttaatcaaagggtaaatgcaggaatgacttcatcttttgggtttatataaaacataaccaacatatacgacatcaccattatgaagaaagttcttttccccattaaacagctgatgcttagactttctttacatgggacaaaaccttttattccactatttgagatatgacttcaaatgcactatgcctgaataaggtaccattgagacttaaatcacactaatatatatatgactatttcatttttcaaatgcatattttaatgggaactaaggggaaaatgagtttgttttgttttgccttttttgttttaaattttaccagtaaagtgtattttgttatctgtactgccaaagaggtaaataattatataaactagaggccagtcacccaccactacggtgggctataaaagggctctttccctatttcttccatcttcctacccttgaaattttggatcttctgcttaatttaacagagcagatagcttcgacattcatttgaagctaaaaataaaaagcacagacaacataacccctaaattatagatgaacaaaaatcttggaagaacattggaatagatcacagggaattgtattaatttctacccagatagcaaagccaatatctgtgactaatccgctcttgctatgatcaaaatagtcatcacaaacaccataatgaaaaaaatccacatgaagaatcggtctatgactttcgccaccttcttccattcactccccttggaactggtg

SEQ ID NO: 481415 - DNA, 1000 bp, Homo Sapiens
gtctactgcagaccctgtgaaattgctgaaacaatctgctacccgaagccccaaaggctctgagtagggaaccataatggccgcactcacttccaaccctgggaaaggtggacatctgaatccccaagtagcgggaacgaccacacttgggggagcgggggttaaggagaaatgagctccttgccggtgcagggtgacagcggggaggaagcctcaggcagaaaagtcgccgttcacactctcccttctctccttcctctgcctccttccaccccctctatccccaccactcgccagttaccggtcgccgctcacctgctggggcgcgaggtgcagagactgtaccgaccgaggacccagaggctgtcaccacggaggggaagtcctcagctgcacaggttggggggggggggcgggcccaaccagtcacatgacgtcgagctccgccctgcctcctccatcccagcgctctacatctcgggggcctgaattttacggatcccttgactattaattttcttggattaaagaaataaaagataaattttcacaaagagtatgttataaagtacaatgtggaaaatgtggacagcaagagttaaagcgcattgctaaggaagtgacgttcacgccacaatcgagggacaggaaatggcggtggcgttccgtccctctggagtccgccggtaaaattccaggctctgaggtttgggccaatcacgtgatcttaaaacttgaggcgtgctggagggtagccaatctatctggccgattgttaactacgtttgttttaaaacacctaacttaaacttgagctttccacagatttctttacatttagaagaactaactttataaaaccctactaggaggcaacagcgtttgaaggtcactctggagaccacaaactgggaagaacggggctgagaaaaactatcttgcggatatgggacaagagagggaggggtggaaaaatctggattttaccgccagggcctac

SEQ ID NO: 481416 - DNA, 480 bp, Homo Sapiens
tcttcacatcacgttttcgcaaaagagatactggctttaagataggagtgtctatacaggaaggaaaaaaaacaaaagcgggtcttagcttcccaggcttcggcaacttgtttgtcatcagtggcagtgacattcatcactctgaggtgctgcatgaccttcgggagtgctgtttgcaacatccatgcccccagatgagcagcaccctggctgagcagctccccaatgtcgggtgcatttttctctcagctcactgccacccttcacagacacatctaagtgacactggtggccccacaggccagtctctacagacatgcactgcagtccaagtagctcctgtttctcaggctgccaagggctcctcctcctttcaacccctcagctcctagacagaggtcccctccctcaaatttgatcacatgcaccgggcacacaccctgctccactaggcccaattttcccctgggagcctcagag

SEQ ID NO: 481417 - DNA, 1000 bp, Homo Sapiens
gagatggagttttgctctcgttgcccaggctggagtgcaatggcacgatctcggctcactgcaacctccgcctcccaggttcaagcgattctcctggctcagcctcccaggctgggattacaggcgcctgccaccacacctggctaattttgtatttgtggtagagacagtttcaccatgttggccaggctggttttgaactcctgatctcaggtgaccatcccgcctcggcctcctaaagtgctggggttacaggcgtgagccactgcacctggcctgtacttcttaatagaatgtggaaaggctctattacgtactagctaagtacaggacttcccggtaaagactgaattcttgatgtgagacccttattgctattaggtccaggactttctcttagtctaatgactgaaatcaggaattggctgacagacggtggtgcaggtgaccactgcactgtgtgggccactccttaacagggtgtgaccagcatggtccctacagaaagcccacgtaaaggacaaagtcgcaatccctcaaccgctggctacatttgaccagaggctggtacgtgggaatgaacagatgaggcaccgagccaggtggcctgatgcgctcatggccgcggctgcagggacttgtagtgagatcagaatgctcggagccgctggccaaggctccctctcctcgtcaaatgtgtggctgcacccatgaccctgcatttctggcaactctacttgcctcttccctcctctccaggacttggggctgggaacattttgggcaggctccctgaccctgcagtgggtggggtgggctctttgcagtgacaggggctgtccggggactggcttccaggtgaaggccgtgctggacgacatcctggagaagattccggagactttcaacatggctgagatcatggcaaaggcagcggaaaagaccccctacgtggtagtcgcctttcaagaatgtgaaagaatgaacatcctgaccaacg

SEQ ID NO: 481418 - DNA, 1000 bp, Homo Sapiens; identical to SEQ ID NO: 308302

SEQ ID NO: 481419 - DNA, 1000 bp, Homo Sapiens; identical to SEQ ID NO: 308305

SEQ ID NO: 481420 - DNA, 1000 bp, Homo Sapiens
atagggagacaacagtgggtccaggggaccggcactcagcacacctaggacctgcaccggcaccggcctctgagttccctcagtttttattgattatgattatcattattacagcacaaaggaatgcagtaggggagcagggtgataataaggggaagttcaacagcaacaacaaaaacaaacacgtgagcaaaagaatccatatcattattaagttcaagggaaggtactatgcctggacgtgcacgtaggccagatttatgtttctctccacacaaatatctcagcggagtaaagaataacaaggcagcattactgccaacatgtctcgcctcccgccacagggcagcttttctccgagctcagagttgaacaaatgtacgatcgggctttacaccgagacattcagttcccaggggcaagcaggagacagtggccttcctccatctgaactgcaagaggctttcctctttgactaatccacctcagcacagacccattgcgggtgtcaggctgggggacagtcaggtctttcccatcccacgaggccatatttcagactgtcacatggggagaaaccttggacaataccctgctttcaagggcagaggtccctgtggctttccacggtgcattgcgcccctggtttattgagactagggaatggcaatgactcctaccaagtatactgctcgtaaacatttggttaacaaggcgcgtcctgcacagccctagatcccttaaacctcgattttatacaacacaggtttttgtgagctccaagttgggtcaaaggaaggggctgcggcaaagctacaaatgatcaacatctcagcaaagcaattgtttaaactacaggtctttttcaaaatggagtctcttatgtcttccccttctacatagacacagtgacagtctgatctctctttctttaccctacatccaagggcttgaacatttcttgacttgttggcaatccaaatcgttacgtctccgaaac

SEQ ID NO: 481421 - DNA, 1000 bp, Homo Sapiens
ggcactccacacttgattttattctgtgacactgagttgctgaaacccccccatttcctgggcagaggagggcagtagggcccagaaaaaaggggggccagcctcccaggaggactggggcctgctctgctggggtcactgctgaccaggcctcagccttccttccagccccaccctctcccctgcagtttgtttaaaagttgagctgcaaaaattaaataaaaataaaaacaaacccctgagttgttaaaaaccaaattaaaaacccccctccgtgtcaacaggtcctaaagccagtgtggcgggacaggcaggcggggcaggcggggcaggcggctggtggagctcagctggtgcttgagtcctcgggctcaccgtcagactcctcctcctccttctcagggcccaggtggccctgggtgcctggccgcttcaggatggcgctgtacttgagggctgtggactctgcctgcaggaccacctccaccaggctgaagatggtgatgacctgtgcagagcccagccgtgaggggacaaggatggcagggcctgatgtcgaggcgcagctctgcctccatccctgcagcaggacccctggcccctccttcggcctctggaagcctctgctcgcctgtctgtaatgggggccccctccaggaagaatgccctgggtcagggcagagttggggagtcagatgcatcctgagcgctcccaaggcttatgaaacacaacctgagggcctgggtccgcgttcagggcacactgttggtgaaaacggttccagacaatttcttgggtgtaaactcatagctttcatcaggttctctaaaggaccctagaaggccagcacccctgcattagcgggacaggcagagcccctcctctctccactgtggttgcccccaaggaagggaaggtggtgccagaaagcaggacccacaggagggggtctgggtgagctgggagggccctaaaaccccacccgggaggctgcagtgc

SEQ ID NO: 481422 - DNA, 1000 bp, Homo Sapiens; identical to SEQ ID NO: 119929

SEQ ID NO: 481423 - DNA, 1000 bp, Homo Sapiens; identical to SEQ ID NO: 308308

SEQ ID NO: 481424 - DNA, 1000 bp, Homo Sapiens
attttaaagagctttttttcttaaaaaaaataatataaagttataaaaagcggcagcagcctggggcccggatctggaggggaggaggtgctggcggctccgttgcagtgggcaggcactttctcgttaatgggcttttgacttgctgctcggcatgttaggctgtgacccagggactcaaactccctttccttcagggaacagaggtagctccagtacctggaatgagggtcacagccaattcagaaagaagtagccctttgattatagcaaaagcaggggtggaggggtgccgcatctcctcagcccaagggaaagggttagggataggggaaggttcaccaggcaaaaagctggagtcactttgctaagaactgacctacctcttcctaaagaaaacagtccaggaactctctcaacttccccttcctccctttccctgcacaaacaccaatgtagcatcttctctgtatcaggtaccccctgtgtgccccaccctcatcaatcttcagggagcctggctggtaccttcagtgtagagcacttctcctcaaaggccagggccgggcctggcttcttgcggcgcacagagcaggccacatcagcaggggcaccagcctgacagtgcttggccttcactggccggcaataagtggccaggtttttccgcttcttggccacctcctcctcagagaggcagttggttggcagggccttggctgggtgtccagctgctccccggttctccagctgagaagccttgactggtgtggggagctgatgaggggagccacgacagtccaggggccctgcccgcttcactcttggccccattgtcccattaagccccatgctcagggctgttttagttttggccgagaggcccctacagccagagggtttcccttttccagtgggctccaggatgcaggtccgtttaagagtggtagggccaggggataacttccgctttcgagaaggggcctccacctccaccccg

SEQ ID NO: 481425 - DNA, 1000 bp, Homo Sapiens
cttttctttttttttttgagacagaatcttgctctgtcacccaggctggagcgcagtggtgcaatcacggctcatggcagcctcaaactcctgggctcaaataatcctcccaccttagcctcccaagtagctgagaccacagccttgcaccaccacacccgctaatttttacatttttttgtagagacaggtctcactatgttgtccaggctggtctcaaactcctgggttcaatcaatcctcccgccttggcctccagtttcaaagttaatgtctatttggccattgtccagctctggagcattggctctgctgagaggttggggtgggaagaggcagagccagccacagggagctggcaggggaccaagagcagggaagagaaggaggtgcttggggtggagacacccccacaacaggctgccggctttgagtcagtcccaccctcctgggagtggcttctcacctgtgagcctccctgagcagtaaggacccagccccacccccgccccagccagccagcctccctgtccccgtcccccaaagtccacttgacttgtaaccaccctatccacggaggtgtggacgcatcatcggcgtgaccctcacgcccaccaggtggcactctcagccattttacacacgcagtggaaaggacaggaggctcctgggactctgggccacacacagaggaacagggaggccagctccaggcacagcgtggcctgagctcaaaacacaggcgtggtccaggatggtgcctactcagcacagagctgggggatcccagcttggggtgctgccgtccgcagcgttgccggcacacggccttccctcgaaggccacgggagagttccgagagtggcctggctgagcctgagagtggccccacagcccaagcccttggccacacctggctcgatgagcccccacccccgcaacgtgcacacgtcccaggcggaagccgcctgcagcagccccaggtcccaggcagcctgtg

SEQ ID NO: 481426 - DNA, 1000 bp, Homo Sapiens; identical to SEQ ID NO: 308310

SEQ ID NO: 481427 - DNA, 1000 bp, Homo Sapiens; identical to SEQ ID NO: 308311

SEQ ID NO: 481428 - DNA, 1000 bp, Homo Sapiens; identical to SEQ ID NO: 308312

SEQ ID NO: 481429 - DNA, 1000 bp, Homo Sapiens; identical to SEQ ID NO: 308313

SEQ ID NO: 481430 - DNA, 1000 bp, Homo Sapiens
gatctatgctttttgacagttaatgtgtatttcttagaacattacctctggggattatttgaggctgaaagtggatttgcatttcctttttccaggcacccaggagagccaaaaatccccgtattctactttaaactcttagctccaggtttttcgaaccaaaggaagtgtaatttcaggctggaaccttcttaggtgtcaaatcagagttgcacatcatattactggtgcagtacaaagtaccacacactccatggctggaacaacaatttgttgtctcatagttctggaggcccaaagtccaagatatgagtgtcggcagggttggttccttctggaggctctaggggagaatctgttccatgcctctcccttagtgccgggtggttgctggcaatctttgatgttccttagcttgtagatatgtcatcccaatctctgtctccatcttcacacagtgttctctctgtgtgcaggtctctctctgtgtccaagttccccctttctacaaggaccccggtaagactggattagggtccgccctaatgacctcatcttaaattgattacatctgtaaagaccctatttccaaatacgatcacatttacaggtattgagagttaagagtttcaagatggggggtggggcacaatgcaatctgtaacacgtgctctcaggttagttctctttccacccactgtcaataaggagaccactactacttctgctgccctcctcccccaactttgcctagttcacaagacaggaggaaagagagaaagcaaaaaattagaaataaacagaagtaagataaatagccagacaaccttggcaccaccacccggccctaggagttaaaaaaaagtaataataataatatcaacccctaacctaaactacttgtgttatctgtaaattccagacattgtatgaaaaagcattgcaaaactttgttctgttcgctgatgcatgcaggccccagtcacgtttcccatgcttg

SEQ ID NO: 481431 - DNA, 1000 bp, Homo Sapiens; identical to SEQ ID NO: 308314

SEQ ID NO: 481432 - DNA, 1000 bp, Homo Sapiens; identical to SEQ ID NO: 308315

SEQ ID NO: 481433 - DNA, 1000 bp, Homo Sapiens; identical to SEQ ID NO: 308316

SEQ ID NO: 481434 - DNA, 1000 bp, Homo Sapiens
tgaggctgccatgaaaccagcttcaggtcggccggcgattgcggccggtttcctgggtgacggcggcgggagggggaggggcaggtgacgagtccagagatcgaggccgcgcgcgtccgctgaacgctcggaccgcgctcgaggcggcccctttacccgcgcgcagccttctcaccccgcccctccggcccaggccccgccccccaccgcgtacccccaaggctccaggggcgtgtcagggggggtgggggtgggcgctgtcacctgggctggccaatcagcaaacgcaaaagagccgaacgctcggacaggcagagggcgatgagacgtcacgggggcggggcctgggcgcggtggaggcggcggcccgcgcagtaggtcacgtgggggcccggcgagcggacagcagagccatccagctgcatggcatggggcggagacgagtactgccctttggcaggcagcgctcctggccggcgaaaagagcgcacttccactagtgtcctggggctcgcctccataggggtctcaaagtgtgtagaactgcttgttccctccagtgggctgtgcagagtcgtgcagcgacgtgagtcgctgtgtggacctacccggcccggccttcccgcgtttcccacgccccgcccacctccctgcatctggcccctggtaatcgtaatcattcctttggctgggattgaccccatatagggtcacctcaaggagcaacgcgaatccttcaccgttgcaagcttttcagggacaagaaacgcggaagttctttcggtttagcatttaaggaaagcacccaaaatcaacctccccaagttcctctatcgaccattcaggcagaaggcgcccggcaccactccgtcctgacgcgcccttgctcctcgtttggcctcactctgcggtcccctcccccacacgccatttcctctccctccattaactgctttggatggcaggggacagaaaagggactctcccttgaccttgaatt

SEQ ID NO: 481435 - DNA, 1000 bp, Homo Sapiens
tttgcggccggtttcctgggtgacggcggcgggagggggaggggagggtgacgaatccaaagaagcgacgccgcgcgagtccgctgaactaccctcacttctttactggctggctacaggctactgcgttctctctgcagctcattttctgtcttggcctccaggcatacatctgtctttaacactgagtattatctttccctgcgtattttgtttctcctgccataaacgccttcagaaatctatactgcttggctcacgtgaagactccttcataactccctgtgactatcatcttccccccacaaacccattcatcaccttagactgcagttcccaacggtctggttggcaacttcttctgggtatttaaaactctggggtccctaccttggttccggacaaaatttgtgccttctcattcgcttggtaaatcttcataaatctgtgctctttggcccttgttcttctattcaactcttgggccgttcagcctagaaccagtagtcagtcatttcaaagctatcctcctttatgttgccttggcattggcccacacttgttgttggggttgatagaaaataaggctggtcagtacaaattttaaccctctttgccttataaaatctaactttatagtccagtaacaataaaactcacaccctaattaagttatattcccaatatgcataattcctctgtaagtaacagttttttataacaagttttcttcctacccctaaaaaaatttccttccaatcattttggcccacccttttctgttaatttaacccgtaaggaaatccctggctttggcatctaggaaaacattaaggcttcatgaattgaatgcccccaatcgcaacgatttggaaaatggccaccccctcccttgaaaaaaaaatatttgtgttttaaaattggaaatcgggtgccaataaaagctccatttcctgggcctattgcctttaagtcgcattgggggaaaaaatcgcctttg

SEQ ID NO: 481436 - DNA, 1000 bp, Homo Sapiens
ccatcaagaactaggcagagagcatgggttcaagatcttttattttcagagcttccaacagttggttagtaatgctagctaagctggtataatctgaaggccatcccacctttctctttaggcagtcaaccaacagaatctctttcttacaaacaatatcattaaccagttggaatctgtctcaatgcgcgtgtaggaagaagtcctctcccccacatttttcccaacaagattgttttatagccaaatgtaactcaaacccgtaacacagcaactagccatctccagtatcactgattcccaccccaagaagttgaggtaagaggggagagactgtctcctgtttaagaaaaacccacctacacctcagtgaagccgtgatggtaaggaggctggcaccagagggcagggatgagtaggcactgaaacaggtctctctagaatcaatgaagtctgccccagctccttggatgaggtgttcttttgaaattcccacttttatggagttagataaggggacaaccggtgatgattcatcactccctgtctctaaaattaaaacatgataaacccagaaagttttaccttcaaaatccaccaagctccctcctgagaaaattctatccagtcatgtccatgccagcacccactcccttctcctaatgcccagggcttccagcccctctcctcacccttgggtggtccatccaacactgatttgatactctttgactcataatatgaccattttttaaaaattagaaaataaaagctatcaatatcacagcaacataaggaagatactcagtggacatgctcctcccccatcctgtggagcccacctacccccaccccccttccctgggaaacctacactgcaacattccagcactgagccgggggtggcccaacagatgctgcctcaagtgctttcctgactgtggctcctataccagccaatgtcatggaactggggtgaggaagaacagggccacacctc

SEQ ID NO: 481437 - DNA, 1000 bp, Homo Sapiens; identical to SEQ ID NO: 308317

SEQ ID NO: 481438 - DNA, 1000 bp, Homo Sapiens; identical to SEQ ID NO: 308318

SEQ ID NO: 481439 - DNA, 1000 bp, Homo Sapiens; identical to SEQ ID NO: 119930

SEQ ID NO: 481440 - DNA, 1000 bp, Homo Sapiens
ctgtcattattagccctttgcttttctgtattgtttcactccgtatgtaacataaccctaaataaattatttcgtatttgaggtaggaatttaaaacagaacaaatcttctcctgtgcttcctctccccctagggagcgaccactgcaggtggggaggggctgggtgagagttgagcccaactacctactccagagtgatgccaccactccaattagagctgacctgagacgtaaacagagggtgttgtgtgtcagccactggcaggttctccctgtagctgccttgcctttctcctgggggttggagggcagatcagtctggacagaacacccccactccaaccccatctgcccggggctggctgggagttcagccagagaaagtcagaaccaagcagaacgtcaccacttttctgggtccctccctcagatataaggggtgagggggctagggagagggtggaaggctgtccaaaatagctacaaaagggcgggcgtggtggctcatgcctgtaatccaagcactttaggaggctgaagtgggagaatcacttgaggccagaatcacctgagttcgaaaccagtctgagcaacatagcgagacccccatctcaaaaaaatacaacataaaataactacaaaaataagcactttactaacaacaggattctcagggaatgggggctttcagaggtgtcactgggctgcactgttgaggctgtgtgcatcagtggagatgtgagaccgaaagaaattatccaggacttgctggcccatgcggggctttttccgactgcacggagaggacacctgggaccttttggaaccctgtgaaaaaatggaaggagggaggccttgtagttgggggagggggagcagagaatcctctccttgtcctctctccctttccccgactctactgatctagctaggcttagcctggaatgctgtagagctttcatcctgcctcaagtatctgccccatcaatcaaccctcca

SEQ ID NO: 481441 - DNA, 1000 bp, Homo Sapiens
ttggctacattaatttattgaaacacagatcaagagcagaggaggaaggggagaggcaggaaggcagttggtcgggcaggttctggtcctggcccttcctgctcctgaggccccttcctatgggtgccagcggacttctttctagggtggcctttcccactgtggggtggcagagcccagaagtgggggatcacacagagaaatgtgaggccaggagtgggaggggtctttcaaagtgcaggagaagtagctgagcacttgctccaggcgcctggactggatgggccaagcaaggcagggcaggcaaagatgcctggggcctgggacttgagttggggtgcctaacatttccggcagctgctgccgcaagaccccacacccagggagctgataccacaggagcccacgccgcaggaaccccctccgcaggtggtgttcaattggccgcagggcgcacacaggccggtgctcaccgccacgttcccgttgcacggagcgctgcagacactgccagtcactggccgggagcctgacacgcagaggtccccgcacacgaccccgccccgggagctgctgacacctgtgaaccccgaaggctgagtcaaaattctgaagggcaagccatcctgccttcctgacaaccgcccctgcccaagacctgagctctggtatgaaaagtcagaagcatctttgtggacaattctaggtccatctagtccaagagctggggtcttttggatgtctgaccccaaatccctcctgttgtgatgccagcccactctttaatattccacattctcagtaacactcctttttccaaactctgccctccatcacaggtagttagtaaatctgtccacactggaccccaaatactcacagacattcacagccccaatgccttcacatagcctgagggcaaaagagaaaaaggcaacattagtgactgccccagagtggctgaaaaagctccccagttcatagggtagggtccacagct

SEQ ID NO: 481442 - DNA, 661 bp, Homo Sapiens
attcagacccaacactaaacactgcaaaatcaacaaatgaccattggtagaaatagctttgaatacccatatctgtctcaaaatatttgttaaatatataaattagtaaaaaaaaaaaatcaaataaaagtaaatctgcgtaattatagctctggttctcatttttatgaccttagagtctaataaacttttacatttacttttttaaaattttatgcatcttaaataaaaaataaattttaaaaaattttagtcattttatagagaaattttacatcaatcatcaaaatgtgggaaccatgacacaattattatagttataactgaaacagatggcagattaaattaaaaaatggaactatacgaagtgctattgttatgtctcttaccttttctttgtggtcacgaagtagttcaaaactctccgacttgccagactcactcatacgtaaatgatctaccttctgaagaaggacatctaaatttaattcctctacacgtgtgttaaatgccttagggactggaaaactctgttcttctgtgtcagtattagctgtaatatacctaaaatcgcagaaataatcatcaactcctttgaaagttaagtataatagccagagcattccttttaaaatgcaagtcaaatcatgcccctcttatg

SEQ ID NO: 481443 - DNA, 1000 bp, Homo Sapiens; identical to SEQ ID NO: 308320

SEQ ID NO: 481444 - DNA, 1000 bp, Homo Sapiens; identical to SEQ ID NO: 308321

SEQ ID NO: 481445 - DNA, 1000 bp, Homo Sapiens
atagaggaacgcaggcgtagggcagggtagggaagctcggtaccagctgtgttgggtcggaaggttggtaccagccgtgttgggttggaggtgggggatagggcacagacagcctacagagttagcctgcctagagtcacacaggagcactgtgagaggagcaagctcgagagtgaaggtaggtgtggatctgcagaatattagagctgccaaatccccggggagtgtgaggttcgtctaggatagcaccactgcttggcagcagcttaaggagaaaagaagaatcgatcattgaggataatatcaggtaagttcaggaaccactcagcaaaaacctgactacccactcgatacaagatcctggaccagatgctatggataaaacagtatagaggcagcccgtactctcttaggagcttaaaatctagccagccagatgagaaaaacaatcacagtgcgatggaaagatgataccaaaataagtttggaggaggggccatttctggatgtagtgatcaagggaaactccctggacttgaacttgacccctacgcatctgactctttgccattaactgtaggactcctgagttctcgaccattatcccccacctggtggtgacagaagacacagatgaagatgctccccttgtgccagatgatacctcagactctggctacggcactttgatcccaggcacccccacggggtcccgctccccactgagccgtctacgccaaagagcccttcggcgggaccctcgcctcaccttctccaccctggaactccgggacatccctctgcgtccccaccctcccgacccccaagctcctcaacgccgaagcgcccccgaactgccggaaggaatcctaaaaggaggcagtcttccccaggaagacccaccaacctggtctgaggaagaagatggggcctccgagcgagggaatgtggtggtggaaacactccacagggcccggcttcggggccagcttccctcctc

SEQ ID NO: 481446 - DNA, 1000 bp, Homo Sapiens
gccaagcagttgggatgggcagagccccacagagtagaaagcaggcaaagatcattggatgcttagtttttgtttttttgtttttttaaaccttttagtttatgaattatgttttgcctgagcaattgtttttaaatcaagtattttaaaagttcaactaaggcttttcccattgggttttaacttacagtgccatattttcttcagctactgaaaatccggttttctttgtaaacagtatcagaattttagcgaagtcctatgaccctccatttcctactttttcttattacatgttcagtgtggagatatggacgtcacaaacatcaaaccacttctctgaaataaacttttttggaaataagccattagcaggaagccaggaattctgttgtttgtccttgtcattaactaccttccagtatgcattgcctttgaaaaagaaaatggagttgtatgcataggagtaataagcggaatctatatttctgaaaggatgattttgtggtattactgctggaaaaacttcagtaatcctctttggataagaattaagtactcgatttctgttgacatcaaatgcaaatacctgcaaagcaaataagatagactggctcttctgaaaattattaatattttttggttaatttataacaatgagataagtaactcaagactttgtaccaaattctttagacttgaacttcttaattttccatcatgctctgccattgctatttagatctgaagtgagtacacgttttttgttttttttttgggcccggtctcactcttgcccaggctggactggagtgcaagtggtgcaatcacagctcactgcagcctcaacctcccaggctcaagtgatcctcttgccttagcctcctaggcagctgggaacacaggcacgtgccaccacacctggataatttctgtattttttgttgagaccgaaacatgggtttcaccatgttgcccagactggtctcaaactcctggg

SEQ ID NO: 481447 - DNA, 1000 bp, Homo Sapiens; identical to SEQ ID NO: 308322

SEQ ID NO: 481448 - DNA, 1000 bp, Homo Sapiens
tgatggataccccaaatactgtgacttgatgatcattacagtctatgcacgtaacaagcactcacatggaccctatacattatgtaaattattttgtatcaacagaaaagtaatcacaaccagcggtgggagctacagcacactgatcctcctaaatgaatctaatttccggttttgttttttcaaactactccgcttgcttaacaagtgcgcgggctgtaggcagcacggccagcagctggagacctcctgcctcgtgtgcggcgtgcgtactccctcgcactgcagcccctccgcgcactgtcgcctttgagagctctcgttggcggaggcggttcctctcccggagttcgcagcgcgcaccgcggcgtcccctgggaagtgtagtcggcgtggggccggaggcatgccgggagtggtagttctcccgcggttggcggggtttcggggacagctcgcggcctttcgggggttctcctggcttgggccatccaggcttggctaggattgccggcctggggttgaggcgctcgcagtggtctcttccgggccggggtggatccgggcctctccagcgagtgggcggcgtgcagcctcgtctgggcttctgggaccagccctacgcggctcgggccccttggccactgggtcccggggcgccgtccgcgagcggcctggactgccggagacccgcgggagggagcgcctcgccaggtgagctgggtgcgccgggccgctggggtggggatgccagccttttgtcgttgttcattctgcgattttcttctgtgcattttcttctgagtaacggaaataataaaagcaatagctgatgcccgccgagagcgctcgggtgccaggcaccagactagcgcatcgcccgaacgaactccgcgcatccctgctaacagatagggtggcggtacgctgttcccgctctgtcaggaggagaccgaggcagagtggcgaggtcattgccccagatgtaactggggcctgg

SEQ ID NO: 481449 - DNA, 1000 bp, Homo Sapiens
tgatggcttttgatcgctacgtggctgtctgccagcccctccactatgccaccatcatccacccccgcctgtgctggcagctggcatctgtggcctgggtcattgggctagtggagtcagtggtccagacaccatccaccctgcacctgcccttctgccccgatcggcaggtggatgattttgtctgtgaggtcccagctctaattcgactctcctgtgaagacacctcctacaatgagatccaggtggctgttgccagtgtcttcatcttggttgtgcctctcagcctcatccttgtctcttacggagccattacctgggcagtgctgaggattaactctgcaaaagggcggaggaaagcttttgggacctgctcctcccatctcactgtggtcaccctcttctacagctcagtcattgctgtctacctccagcccaaaaatccctatgcccaagagaggggcaagttctttggtctcttctatgcagtgggcactccttcacttaaccctctcatatacaccctgaggaacaaggaggtaaccagggcattcaggagattgctggggaaggaaatggggctcacacaaagctgagggagagctgcttaatgtgctttaaaagagaggagattctatgtgcttttatcagaaagtttgagttccctgcccctctgccttcttcacacccattacattgtgggaatggatgaaagccacatgtctgtgtgtgtgcatgtatgtgtgcaagagacagcgactgaaatgtagtaaagggaggtatctttatgcgaaaaattataggcatcaagtatattttatatttttttctactttaagtcttcgcctccatagtcatgttcctacctttatcacttccatttttaattcccctcccttgccatatccccactattccttcacctccaattctaattcctaccatatcttctttgcttctccctcatgtttttcccacttcactatatgtctgttttgta

SEQ ID NO: 481450 - DNA, 1000 bp, Homo Sapiens
tgattcatggaatatatgtggaggagcaaagcctagaaaaatctcatttttacccagcatgagctttttagctgagacactcaacatagactcacagagaatattaaaactcaccatcagaacgctaggacatgtgagccaaagatttcgatttaatgtttattaggaaacaaaggcatcaccatggtcatgacaatatttcatctcaggacattcttcaaggcctgcttcacatctttattcctcagactgtagatcaatggattaagtaccggactcacaaaggtgtaaaagacagctattattttagattcctcaacagtcttatctgttggtggtcttatatacatgcaaaagagagtcccataaaacagggtgacagccatcatatgggaaccacaggtggagaatgccttgtgccttccctctgctgatttgatccggaggatggcagcaagaatgaaggcataggacaccaagacgatggtgagggagctggagaggttgaagccagcagatatgaacatggcatgctctttgacataagtatcagaacaagaaagcttaatgagcggcgggtcagcacagtagaagtggttgatgacactggatctacagaaggtcaggcggaaggtcaggatggcctggaagagtccatctgagaagccatagacatagggaaatgtggccaagcagatgcaaactctcctggacgttttcacactgtagcgcagagggtcatatatggccacatagcggtcataggccattgctgccagcatgtaaaactcagtgagtagaagggcaatgaaaatgtagcactgtgtaaagcaaccagcaaaggaaatggtcttctcagatacgatattagtcgacatctgcggggttgcatttgatgtatagcacaaatccacaaaggctaagttagtgaggaagaagtacatgggcgtgtgaaggcgagagtccagtctcattaacattatcatgcccaggttgccta

SEQ ID NO: 481451 - DNA, 1000 bp, Homo Sapiens; identical to SEQ ID NO: 308325

SEQ ID NO: 481452 - DNA, 1000 bp, Homo Sapiens
atcaggaaccatgggggagagggagagggaggagagggagcaggtctctgagaaaggggggcctgttcctaaaagggggtttgcacaaacaaagcccgaccatgtaccagcagatcctactccacattccttcctctgaccatcacctaaaggccctcttaatgccttgtcctgtgctcgcacctccctccttcctggtcttaggctccgctggtcaccacctctggggccctctggggctgaggtgtgatgtgcacgtccctgccctcctgtccattcttgctttgcatctggttgaagaggaagtttagtatttaccttgttgattctgctcaaacacaaaccacagctacctgcagaggcctctgctggctttgagaccagccacttagctttcctggggtgggggctttgtccctcccttgccctcagtccctgctcccccaggcactgacttgctgcgtgaccttggacaggccactggaccctgtctgacatgggtttccctatctgtaaaatgagttggctcgatctcccttccatttgagctaatatctaacaacctgtcatttctttcctggactcaaatttctcacatcattgccctcattttctctgcctccagtctccagcccttcatccacatggcccaagtgatctttccaaaatgcagatctggccaggccactgctcagatgccttctgtggatcctggaattagcctagagttcaaggcccttggtgatgtggcccttgcctccctcctctggcccatctctctgacctccatgcctgtgcatgcaccactccttctgcctgaaactccctcctcctcacagaggggaaactctccttcagccttccagacccagcccaagtagccccctgtgtgatgctgtccctgaactccctggcccagcagtcagcactcgctggacccccacaggccttggcatgcactgtcactactgcactgatcacacagaactgctgtcatctg

SEQ ID NO: 481453 - DNA, 1000 bp, Homo Sapiens
acccaacccaccgagcttctcacgtgccagacactgttcttcagagcactttccacacagcggctccctaaattctcaggacaaggttgtgaagttggtactgtcgtcacgcccattttacagatgggggaccgagaggttcaataactgcccagggatcctccccgagggaggctggtgatgggcttcataattcttgttcattgtgaccactgtggtgatgatgatggcagtgatgatggtgacaggtgactgtggttgggtggttgatggtggcggtggccatgttcatgaaaaacacaggcatgtgggtattggtgacgatggtggtgtttgtcaaccagggtgacagcaatggtgatggcgacacggtgccaacggggagaccatgttgcatggttggtggcagcaatgcccatgtctttgatggtcatagggaaggtggtattggtgatgctggtgacggtgttggcccagccctgatgggcatggatggtgacgcgatggtgaccgagaacctccctttgcagatttgaagttcctgaataaccacatcctggtgaaagacgctcaggagaaggccaacgccgccctgcttgactacaccctgtgccactacccgcactgcggggacaaattccagcagctgctgctgtgcctggtggaggtgcgggccctgagcatgcaggccaaggagtacctgtaccacaagcacctgggcaacgagatgccccgcaacaacctgctcatcgaaatgctgcaagccaagcagacttgagcctgggccgggggcggggccgggactgggggcgggactgggggcggggcctgggcggggccgcagccacaccgctggctccgcatggttcattttctgatgcccaccgaggagccccagccccgtcccagaggccgctgcccctgagttctgacactgtgtgtttgggaaggtgggtgaggctgggcagggcctggcggaggtggagtggccactggcact

SEQ ID NO: 481454 - DNA, 1000 bp, Homo Sapiens; identical to SEQ ID NO: 119931

SEQ ID NO: 481455 - DNA, 1000 bp, Homo Sapiens
ggcctctgagaaacaaggaagggccctgggaccccaggccaagccatgtccggctcccccagcctggctgagtccacggcgcctccctgcccagccctcgggagaggggagagggcgctggctcctgggtagttccaaagtggagtgtgaaaatagagagatatatatatttatatgcagtgggcagtccagcgtggcactcacacctctgtctggaagtcaccatccggtggttctgtgggctcccaggctgctgcccggtgcagagtcagccgttctcggggcttggggggcagcgagcccagtgtcatagatttgaaggtgctccagctctgatggcgccgatgttgggacaagctggggcgctccccagggctgggcttatcctgtggagggagcgggaggggccgtggagatgggccaatatccttacccattgtacagacgatcaaactgaggagtcccagagagggctggtaatgcccaaagttatggagcaatcaggtgtcaagcagaattcaaatacagacctgcctggttccagggtggggctcctgacccctgttctcagtggcccccaggacatgtctcctgctgaccactctccctcccaatcctggaggacctccacccctgttcgccatctgcagcaccttccccacccccaggcggccccagactgttgcccatgccgtgggggaggcccttggtgagacaggctggggttgcctgggaggggcaggagggcagggagggcacgggtccctcaggcccacctcaccccacccagcccggggggactcacggtgcacacgctccgctcggctgccccacccgaggacacactccaccgcttctccctctgcaacgggggccaccggtcaggctccaaccccaggggccactgcaccaggtcaggccctgagcttcagggcaggggcagccacgggaggagccctcaccttggccgtggactggctgcggtagcggtcgaaagtgt

SEQ ID NO: 481456 - DNA, 1000 bp, Homo Sapiens; identical to SEQ ID NO: 308328

SEQ ID NO: 481457 - DNA, 1000 bp, Homo Sapiens; identical to SEQ ID NO: 308329

SEQ ID NO: 481458 - DNA, 1000 bp, Homo Sapiens; identical to SEQ ID NO: 308330

SEQ ID NO: 481459 - DNA, 1000 bp, Homo Sapiens
actgcttacagctacaaacccagcagacaaggcactattaagaaggttacatgagcatgaaaattctacgttgaaaagaatgggaatctaatagttggttttgcaaacacacaagctctcgtgacagtaggttttgcagtatctaaatacaaaagacaagctctcttgccccattgaggatatcgcatgcccaaggtttttcacattttcaataaatgcagatgtctgctcaggactttctttacagcctctttgacctctttattcctgaggctatagatgatgggatttaacattgggcttaccactccataagacagcccaataatctcatcagatgtattagtgttctttgacttgggtttcatgtacataaaaagggctgaaccgtagaataagatgaccacaatcgagtgcgctgaacaggtagagaaggctttctttcttccctcagcacaattaattctcaggatggaagagagaataaacacataggagatgaaaattaacagtagaagaatcaccagtgaaacaatatttgtcactgtcatgataagcacattgatggtgatatctgaacaaacaagttttagaagggccaaaatttcacaggtaatatgatcaatgacattattcccacagaaaggcaacatcattgtcagaactgtttgcaatagggaggtcagacagcctatgatccaggaccatgcagccatttgcacatacagcactccgttcatgatgatggagtacctcagtgggttgcagatggccacatagtggtcataggccatcacagccaggaggacacactcagtggagcccaagccaagggacacaaccatctgcagagcacagccaatgaaggagatggattttctctcagacataaatataataagcattggaggaatggatgaggatgtgtaacagatgtccaagaatgagaggtttccaagaaagaaatacatgggagtatggaggcgagaatccaagatgg

SEQ ID NO: 481460 - DNA, 1000 bp, Homo Sapiens
ctaacacttttaaaggaaaggctaaatattctgataattttgctctcctatctactgagatgattcctcgattttagagaacatacattccattgaatattgccctattttcaaagcttgaattcaatcactcaccatttttatattaaacttcttctacaaaatatattcaaaattcttgcttcagcaaaccacatgttttaaaggcaaagcccatacaccgttctcatggacctcttcctctggagtgctctgtggagggcgcccttcaactgagcattcctcaggctgtagatcagggggttcagcattggattaaagacactgtgaaacagggacagcattttctcctgctcctctcgttgattagagtctgggaccatgtaaaccaccatggctatgccaaagaatagtccaaccacacacaggtgggaggagcaggtggagaaggcctttatgcggccctcctttgtctggatcttcaggatggccccgaggatgtgcatgtaggagaccagaatcaaggaaagaggcccgactaagacaaacacacaggtagcaaatatgaccacttggttaacccaggtgtcagcacaggccagcttgaggacagacagaatttcacagaagaggtggttcacatcccggggcccacagaagggcaaccttagaaggagaatttcatgtaccagggacagggcaaacccacatgaccaggacgtgagaaccaggatcgtgcacactctccagctcatgatgacagtgtactggaaagggtggcagatggccacatacctatcataggacatcaccaccaaaatcaggcactctgtaacagcaaaagccaaatacaaaaaagtctgcattatgcatggaacaaaggagatggttcttttctggttcattaggtttgccaacatcttgggaacattgttggaagcataggacatgtcaatgatggccaggtgtgagaggaagaagtacatgggtgtgtgaagct

SEQ ID NO: 481461 - DNA, 1000 bp, Homo Sapiens
ttgcgctgagcctggtggcccccactcatccctgtcccttgcagtcccccttggctgccgcaccccctctttcctgccaggctggagagctggtctctcccctcccatctcctgccccacgagagcctgcccagcacagagaacccagaggaagaaggtggaggaggacaggggagctgtgcaggtgggcgaccgaggggtcacacagcggccgtctgcttgatgctgtggaagctgatccgtgtgggtgatgtagggatggacatggcccgggccatggggactcgaagggagtgatggtcctgccagcggtgccacctcttcctcacggctgagcgcacctgtggggaaggcagaggctcagctggctcccagggaccaaccctgggcttctgggaccatcccctcctctgctttctgctctcatgggtcgactgccaccctcatgacaaggaactgtctgcttccaaaacaggtccttccctgatgctgttgcctctctccaggggcctcttccttatccttttcctggagaagcttgactccacacctcctttactccacactgtcctcccagatcatccagtttcctctggacacactgccttcccttccctgactcactctgccacctcaaaattagcatcttgggaccagagagcgcagcttggagacttggccccctcagccttcttgggcccctgctccttgcagggcgttggtggtgtgcgcccagctcacacacctggtgcgcctcctcctccctcctgaagaccgtcccctctgcacccctccaccttctctacctcctgctagactcccctgcctgactaaccatggcatttactgcctgaaagggaaagctctctgtcttggtcatttctaaagttggctctacccggtgccatttaagcttcatttgtttggtaattgaatttttttggaaattggatggtgtctctcacatcctagcttgcacatggttcgaacagaataaatg

SEQ ID NO: 481462 - DNA, 1000 bp, Homo Sapiens; identical to SEQ ID NO: 308331

SEQ ID NO: 481463 - DNA, 1000 bp, Homo Sapiens
aactggttggttgtgagacaccctccctcttccctgtgccctacccgctgcctgatgagttgggtctaccacccaccccattcccagcaggtcccctctttgattggtcctgtcttgtcctccaagaagagctggccttccgagaaggaagtggggtgggtacctaagattattcccctttcctctgcatctttcctgtcctagacttcctccccgttctcactgagggagatggtgtggaccttaatggttggaacttgatggttcttgtcaaggctgggggttgagggccctacacagcagcagacctgcaaaaagcttttacttctcacccgggctgtggtacaggaggattggtctttggacactgtaatcctggcagatccacggggcatggaagagaaaaatttccattcacaaacgccatccgtcttggagatcctgtagaaggtctctcttgatcccacggggatgcgcaccatgtccttgtgttgcccttccacggcctggctgggcgggtgcagggtgtagcccagggcatgtttggaagactgctttctgcagagacactggattctcaagacattctgaaaggcctttttgaactcttggctggagcatgggtatatgatggggttgatgcagctgtttagatatccgagccaaaatactattttaaaaactgtttcagagggcttgaaatcagggaagaaagaccctggaagaaaacacacagatttatacatattatttgaaagccagcaagccaattggctaggaaaacaatcaaacagacatctttctgtatttttaaacggttaaaatgatcccaaacacatatgagtttctcacatttgactgactagctcctatgactgtcacccttttgcaatatcttcaaagaccattcctacttggtccgcgtgtgtcattaattacaggagcaggcccagtgggtagggttgcactggctctcagtgaccaacagctgctgtgaagt

SEQ ID NO: 481464 - DNA, 1000 bp, Homo Sapiens
atttagaatgattataaagtaaaggccccttggtcttttatcattttgggtaatttgctttatccctaactgcatacaaatatttgagtattggcagaatgtgtttaatgagaaaatattctaacaaaaattgtaggcatgaactagactttgaaagtaactaaaatatgctctttagctcagatttttaggcaaaaaaatcacagaaatgaagggatccttttcctgctaattacattcgctaaagccttctttacttccttattcctgaggctgtagatcagaggattcaatatggggatcaccactgtgtagaacacagaaaccactttgtcctgatcagggagtagctggaactaggtctcaggtaggtatagatggaggtggtgtagaagaggattatggctgtcaggtgagaggcacacgtggagaaagctctgtgcctcccctcccctgaatgcatagaaaaaatggagaagagaacgtaggaataggaggagaggatgacaagcagagccccgaccttattcacaccagcaaaagtggaaaatatgctttccttcaagtgtgtgtcagaacaagaaagcttaaaaagtgggggactgttgcagaagaagtgatggatgacattggagccacagaatgacaagctgctgacatagctagtgttgaccatggagttcagcaaccctgcagcaaaagccccggctgccatttttaggcagactgtcctggacatgatcaaggagtaaagcagcgggcgacatatggtcacataccggtcataggccattaacccaaagaggatgcattcggttgtcgccagggcgataaagaagtacatctgtaggaagcagccagcaaaagagatggttttcttctctgataataaatctgccagcatctttggggtgatggtggttgagtaacaaatgtccacaaaggacaggttaaccaggaagaaatacatgggtgtgtgaagccgggaatcgatcctgat

SEQ ID NO: 481465 - DNA, 1000 bp, Homo Sapiens
tgtagttctttccaagaagagaaattacagagtcaaattgtagaaatatttaaaaatctttggcacacataaacagtatccatataatttataccatcttttagatgagttttaacaccaaatgatagaaatctcagtttcatacagatttggtgggctggaaccaaatacttgcctgataggctgtcccctcgtctttcctagctgttctgggaaaggcagttcctggtaagaactctccctacggcccctttcatctcactgttcctcagggcatagataagtgggttgagcagtggggttcccaatgtgtacaccagtgagatgaaccgatcttgcttggggttgtagctggagctggggcacaggtacatgaaggcacagcagccatactgcagcagcaccacagtgaggtgggaagagcaggtggagaaggcccggtggcggccagcagccgagtggatcttgagcagagcagccactatgaaggtgtaggaggtggtgatgaggaagaaaggcacagcaatggctagtatggctgccaccagcactgactgctcatgaatgtgactctgagcacaaacaacatgcatgactggtggcacatcacaaaagaagtgctcaatgccctgagcctggcagaatggcagagagaagatgaaggccaccagttgtaaggacaggaacagaccactgatgactgatgccacaaccaagtggacacaaagagtcaatgtcatgaggagagggtactgcaacgggtggcaaatggccacatagcggtcataggccatggcagccaagaggaagcaatcagcactgcccagtgcaatgaagaaagccatctgggtggcacagcccaggagagtgatggtcttctctgactgtagggtgttggccaggatatggggcaccaccactgcagtgtagcatatttcaatcccagaaaggctgcccaggaaatagtacatggatgtgcatagacaggtttctgtgtgaa

SEQ ID NO: 481466 - DNA, 1000 bp, Homo Sapiens
agatcatcaagtccagccctgttgcacttcagctgagagtactgagagtcagaatggctggtgacacagctgcggtcacagattaaagtgaaaaccaaggccagcgttcaagtctctgtctccgcagtcagtctttccactatagactattcagaattccttagctagctcactctttcactaaggcagctcctctctttctaacactggagctttacagaatagacacatggtggagaagagcaagcccttccttggtggtctttgttggaggataatctgcttctcagcactgccctcatcctcttttcaaaaactcctcgaaccctgacccacacatccctgaggactccctgcactgtgtcattcctcagagtatatataaaggggttgaggaatggagtcaccacactgctcagaaccaaagggatcttgttgatctccagatattctttctgggagggagtcacatagataaacacagtgatgccactaggaatgatgactatggtcaggtgggaagcacaggtattaaaggccttcttccttccacttgcagaaggaatgcgcactatggtcaagatgatgtacgtataggaataggccacgaggactatgcagcagaggatgaccatggaagaaagcataaaatccatcagctcgatggcagtggtgtctgcacaggccagggccagcaagggtccactgtcacagaagaagtggttaatgatattggagccacagaagggcagctgggagatgaggatggttggaaagagcacagacaggaagcctcccacccaagagaatacaacggtcccaatgcagacagaaggtctcatgatggtggtgtaccgcagggggcagcagatggtggcataacggtcataggacatgaccgtcagcaggaggaactcaactgtgcccaagaaaaagtagaaatagcactgggtgatacatccggcaaaggagatggttttatccctagatcctaagttgg

SEQ ID NO: 481467 - DNA, 1000 bp, Homo Sapiens
agccgagtagtccccaaggccaattcaaaagcccagcccgggagtccgtccaccatggcaacggcccatctctccatggtcgttgggctttccaaagtctgcggctgactggcctggggctgggccgggctcgggggccacaggcagtgtgcgacgaggccgaatctctgcttcatcacatgggcaggtgggctggaggcctagatgcggctggacgaggtgctgcccgagctgatggggagcctggcgctgtctgagttgctcttcagaggggaggggccaccccgggcctgcagccgcatggaccagtaccagatgaagatgaggaagcctgcgggcagtgagggcacggggtcagcaggtgggggagccccaccccatccctcctcctccctccccagccattgtgactcgggtctgccccacctctccatagtgtttgccaagcacgtgctgtcgggcacccatgagacccagcgagcacctcctatgagccgggcactgtgctgcgtccccgtgtggcctctcactgtcacaaacttcctaggcccatcctattcattactattctcttttgtaaacaaggaaactgaggcccaggaggctcaggtaaagggacgtggctgagccagggctcaaactgtggtgaacaggctctgaagtccacccacttaagcactgtgagattttgcacccctcaaattaatagcactatgatgtatccacagcttagtaaatgtctgtgtgaatgtatgggcctcacttacaatcctgagtcccctcatctcacaggcaggaatgaaggcttgaatgttaaataaccgaaatgtggtaacatctccccaccaccaactcccagctcccattctagggtgaccctgtatgggaggctggccttgaaccccatgagagcccctgggcctggccatacaacccccttccattctgcacggccaggaacagaggggtgtgcatgcctgtgtgtgcacctcaatgtaca

SEQ ID NO: 481468 - DNA, 1000 bp, Homo Sapiens; identical to SEQ ID NO: 308333

SEQ ID NO: 481469 - DNA, 1000 bp, Homo Sapiens; identical to SEQ ID NO: 308334

SEQ ID NO: 481470 - DNA, 1000 bp, Homo Sapiens
ggaaaccctgtctgtgaaccctggcacctcaggcccccaggttagagtcccctgaggggactgtagggcccatggctgaggggcacctggagagagtggcccaccagccactgcctccatctgtctccctctcccaccagagccctgcccagggttccctccctggcctgggccaccagcccctggtccatgaggtgccctcagagactggtgaccagctgcatctgcccgtccccatcgggccctggcccctcaaggcctggggctgccaggtagccctcgtggctaggacgccgcacctggtagtagccctgcaggggattccgggccaccagggctggcgggcgcgaggtgtagtagatttcgggggggccggggggtgcgggagggggtgggggcagggcctcactgggcccctcagggctgctgtccgggtaggagggtgagtcccgcaggttggccccgctggcatagagggagtcccggccaggaggggaggagaggggccggctggtggcgccgtcctcggccgtgcagctctccgactcgtccagatcgctctggtacagcaccgactgggcccggggcagcagcagaggctcctccagggccttatagagaagttcaatctcggcccggtcagcacccccgggcccgcccgcctcttcctcgcccccgccccctggcacaggtggcacagggggctcaggcggtggagggcccttggccgcgctgctgctcccccgcaggttgttgtgcaccagctctgagatgatcatcttctcaaaggccgccgcatcggctaggttccggcctcggggcggctcagggcccccatccccgggagggaaatccccacttcgcaaggagtaactgttattgaagttgccgttcaggggcagggtgtccatgccacaggcttcccggcctcccaaggggtgctctgcagggcagaaaggggctggtcaggttgaagaggggccctggatgcactagggga

SEQ ID NO: 481471 - DNA, 1000 bp, Homo Sapiens; identical to SEQ ID NO: 308335
  misc_feature (71)..(170): n is a, c, g, or t

SEQ ID NO: 481472 - DNA, 1000 bp, Homo Sapiens; identical to SEQ ID NO: 308336

SEQ ID NO: 481473 - DNA, 1000 bp, Homo Sapiens; identical to SEQ ID NO: 308339

SEQ ID NO: 481474 - DNA, 797 bp, Homo Sapiens
gaattccctccagctttgggcgattctgtaggtttcctccttcccaaagcgaggaaagaggttttcttgattctcctttctgaacactttctattcacttaggcacaaatctctcagccttcctacacatggtggtctcagcacggctgctttctgcctaggtgaatatttgacattcattttggctgcttctatgtttggtgcattcttatctaaagaacttgctatcaaagctgaaaataaatgataggtacttgctctcctagcattatttatagccagaatcaaatttgtaaccaaggtttcaacaaaagaccatcacactgctaggaaaatggagtgttctctgtctctctctctctctctctctcgccctctctatcataatgcagcagagggcatggctacgaaggttagtacgttgacacaagaagttggggtgctcgggtggggatgtttgtcactttggctgggctaagtgattctcgtgttgcatagtggtacaaatgtttgggtctatgtcttggtggcagctaaaaaccagttctgactcagggtttgagatgttgattacctctggcttggccctgcagccctcccgaaaattctgtaagttactctatatcctttgacaaactcttttctgtttagttacccagagtcgaagtctattgtttctaacttagagccctgactaacccagtaaatttcctgcagaactgatgcttttccccaaattctcctctcataatagtgatggctttgaccccccgtgtaaaggtgagcggtaaaagctt

SEQ ID NO: 481475 - DNA, 1000 bp, Homo Sapiens
gatcacttgagtccaggagttcgagaccagcctgggcaacatggcaaaacagtgtctctactgaaaatacaaaaattagctgggcatggtggcgagtacctgtagtcccagctacttgggaggctgaggcaggaggattgcttgagcccgggaggcggaggttgcagtgagctgacatggcaccactgtactccagcctgggtgacggaatgagatcccgtctcaaaaataaaataggccgggcacggtggctcatgcctgtaatcccagcactttgggaggctgaggcgggcagatcacgaggtcaggagattgagaccatcctggctaacatggtgaaaccctgtctctactaaaaatacaaaaaattagctgggtatggtggcacacacctgtagtcccagctacttgggaggctgacgcttgaacccgggaggtggaggttgtagtgagccaagatcatgccaccctaactccagcctgggcgacagagtgagactccatctcaaaaataaataaataaataaaataaaataaactatacacttctatttcctgccccctgttttttgtgctattgttgtcataaattttacttctacataggttataaaaccctagctaggggtctatattataaaaatattgttattatttttgctgtaaagaatcaattttttgtgtgtgtattggtctgtcaccaaggctagaatgcagtggtgcgatctcagcccactgcaacctccacctcccagggctcaagtgatcctcctgcctcagcctcccaggtagctgggactacaggcacgtgcaccaccacacccagataatatttgcattttttgtagaaacaaggttttaccagcagggtgcagtggctcactcctataatcccagcacttttggaggctgagctgcctggattgcttaaggtcaggagttggagaccagcctgaccaaaatggtaaaaccccatctctactaaaaatacaaaaattag

SEQ ID NO: 481476 - DNA, 1000 bp, Homo Sapiens
tctttaacactcatatcttattcagttcgggctgctataactaaaataccacatactgggtggcttaaacaacaggaatttatttctcccatctctataggctacgaaatccaatatctatgtgctggccaatttcgttcctgataagggctctttttctggtttgcagagggttaccttcttgctatattctcatatggtggataaaaagacccatctgtgtctcttcttgtcacggcactaatcctactcatgaggattccaccctcaagacctaattacatcccaaaggccccacctccaataatcatcacactggggattaggacttcaacatatgaaggaggtgtgggaggggatgaacattcagttcatagcaatcaagctttatgaccatctggggtttgaatttataccaccagcatggtctaggaagctccaagccaggatagtaacatacagtattcccaggttggtagcacccaaagacatccaacagaaggaaacataaatcccctctggagacccacatcctcaacacaagctacctaggattctgacaaataaaaccctgacaaatgtaaactcacaatgcagaactataaagcatatgagaaaacaaaccaccagaaatcacaaacagcagaaatttaacccccaagaactacatataattgaattatgatacataaatataaaacaagtatgtttataccactcaaagacttaaaatgaaatgtaaaacattacaaagaaataagatgttatatttttaaaagaccaaggagactgaaaatgtactaaatataaacattgaaattgaaaagtcaatgcataagttaaatagtaggttagaaacaacaacgatcgatctgaaagacaggaaacgaattaaatataggaaagagaagttaagagagggagaggagagatgaagaaaatggcacatatctaaaaggagggaatagagaaaaggaggtgaaggtaatatccaaggaga

SEQ ID NO: 481477 - DNA, 1000 bp, Homo Sapiens; identical to SEQ ID NO: 308340

SEQ ID NO: 481478 - DNA, 1000 bp, Homo Sapiens; identical to SEQ ID NO: 308341

SEQ ID NO: 481479 - DNA, 1000 bp, Homo Sapiens
gatccgggccccccctcgatccatccgcctcggcctcccaaagtgctgggattacaggcgtgagccaccgcgcccggcccccaaccttgggacattttcatccattcattcatcctttttttttttttttttttgagacggagtcttgctctgtcacccaggctggagtgcaggggcaagatctcagctcctgcaccctccaccttccggattcaagtgattctcctgcctcagcctcccaagtagttgggattacaggcatgccatcaacatgtctggctaatttttgtatttttagtagaaatggggtttcaccatgttggccaggctggtctcgaactcctgacttcaggtgatcctcccacctcagcctcccaaagtgctgggattacaggtatgagccaccgcgcctggcgcatgggcacatccattgagtgtgcacttggtgccaagttctgtgccaggcacaggcaattcaacatttattggaatgatgtagtccctgtctgcatggaattcataggctagaggaggaagcagtttgcctctggtcccatggccagagcagccccaggtgaaggttatgaattatttgtcccatctaatggtgttccagcagtctgccacatggtgggaaggaggccccacagagctgtgctgtctccttcccaggatgagctggagcacagcctgggggagagtgcggcccagggggcagctggagtggtgctctgggtgagctgggaaaatacaagaaccaaggtgagcttaggcctggcatgagggtgggggtgggggaggggtggggccattaagctgacggggtagaccctgacttaccctttctacctgcaaagtcctggctgaccagcaggtgagtgcctcagtgccctgggtgggtccatacatggccatggtgtccctgacgctatcctcccttcccacctaggaatcatgtcaggccatcaaggagtatatggacactacactggggcccttc

SEQ ID NO: 481480 - DNA, 1000 bp, Homo Sapiens; identical to SEQ ID NO: 308342

SEQ ID NO: 481481 - DNA, 1000 bp, Homo Sapiens
ttgtcacacgaggcccgggcgcccccgacagttcgggattatgtcagagtgacgtcacacaccggaccccggcgagctgcgggcatgagcaacgcgcgcgcccccgcccccgagtccctcccgccgccgcgctcaccgctgaagaccatggcggccgaggcgcccatgacggcgaaaaacgaagcatactcggggccgctcttggactcggacatgtctgcgggtggggagggggcaagctctgcgggccgaggcggtggcggaggcgggggcgaggacgggccgggcacgaaggtttgcgggcgggcggcggcgaaggcgatccggcccgtcagccgctgcgctctaaataccagcaccgcagaacaaaatggcggccgcggccgcgtcacatgacctgggccccgcccctgcgagccgtaccacttcgcaccgtgggggagacgcgtccccgggacgcccggccggcccgttgacctccccccgggctgtgccgcccgcccagcgacccggccccggcgcccggccccgccctgcctcggcctccgcgggtgtttccgggcgccgccggcctctggatctccgcagcgttggaccggtctcgcgccggggcggggcggtgtggtgtgtgcttcattagcatacggggcggggcctcggacgccccgcctcctctgcggctgcgcgtcgtctgcaggtgttgggttcccggcgacgcttttctttgtacccctggcgtgaagctgcaggccgtggtttcgcggccttgcccccaagacggggcctcacccctccgggcgctggtcttccaggatctccctaccaatcctgggcgaaactaagggtcccagcaaaatgtgcggcgcgcgggcctcctcttgccacagcgtccggaaaagcccccagcccacacctgtgaaagtcccagccggtggccgcggtcacctccctccaccctgtccccagtctcctccagacccagacgtactgcctctgaccc

SEQ ID NO: 481482 - DNA, 1000 bp, Homo Sapiens; identical to SEQ ID NO: 308343

SEQ ID NO: 481483 - DNA, 1000 bp, Homo Sapiens
ggctcaaatactttgcctaaggtttcactccaggtagctggtggaggcagtgctcatactggactcagactctaagccaacctgccacctgccccttctccccaggtactgagagagtcacctgccccttagcattgctgtgaggtaagaaggaggcactgactgggtgtcatctctgaccatcagagttaacaagctttagagcatgcattttggacagcaagttcaccaattttgcccaccttctgggtcaaaggaaaaaataaaagcgctttgtaaaatgtaaaagtctatacaaatattccctttatcattttttggacaggtaaagtgataagttaatagtaaattgataagaagttaataaacagttattgacaaggctcacattttaatccattttagaagcaaatgagcagagggagtagagtttagctagaagaagggagttagggctcactgttaagccaatagcctctgacctccactcccctcccctcctccagctcctccccacctgcttccccacaacaggaagaactctctgcagaaggtctcctcaccttgttgaggcctgggaatgtgcaaatgtgcaggtaagctgtggactggacaaagaacagattctcaggataacagtacaaagtttgaaaattttattggaaaataagtacagtctattgatccgtgatgcatgctgtacatgaatttggtgctttaatatacaaaaaatttggcttctgctgcaaaattatataaacaggttaaaaaaaactccttcatcaactagtacaaacataatttatcaaaaatgtcatttaaaaaatggctcaataccttttattgcaaataagaaaggcaagagagggaaaatataaattgtgctaaaccagttttaacaaccggtaattaaatattttgttgcatttgcaaactcttcttcaacacttagggcatctttaaaaaaatgccataaaaaaactgcaagaaaatctaatta

SEQ ID NO: 481484 - DNA, 1000 bp, Homo Sapiens; identical to SEQ ID NO: 308344

SEQ ID NO: 481485 - DNA, 1000 bp, Homo Sapiens; identical to SEQ ID NO: 308345

SEQ ID NO: 481486 - DNA, 1000 bp, Homo Sapiens
ggatccagactcgaggaccctggcactgctctctctgcctcacacctcttcttaggcagcatgggaggcactgcctggtgaggcctttgcacagccacgtctgtctccattccacagatgagccgcagctaacgttactcagctttcactggcccaggtacctgcccgtcatagctggattgctaggtcagaagatccctggggaagcactttggggggccgaagctgcggatcacctgaggtcagagttcgagaccagcctatccaacttggtgaaacctcgtctctactaaaaatacaaaaattagctgagcatggtggcacatgcctgtaatcccagctactcaggaggctgaggcaggagaatcacttgaacccgggaggcagaggttgcagtaagctgagatctgccattgcactccagtgtgggcaacaagagtgaaacctcatcttggaataataataataataatacttctactggatgcttgtagagcccctcactctgtgccagatggtgctcagagcagagggtggacccagaggccagggcctatctactgtgtgcaacccgcacagcctgccaccccagctggccctgggcggtgcccccagccacagcccctcccaggtcctcctcccaagtgtctctaacatctaacagaataacaggttggattcttccagttggtgttgtaggatgaggcaatttccaatttattctctttgctttggaacatcgataaattttacagctaaatctgctttccatctcctctgtagcaacaactgtcttcaaacaaaaaattagaaccaacacatatttttgctatctttggatattttcctagacctctaaatgtcccaggcttttcaaggctgcagacagaattgtgctgtttagaattctgtgatcagttggcttttttgtgtgtgactaacgacacctcgtatgtgaaaaattagcgctgccacagcgatgacagtgaacagagcacag

SEQ ID NO: 481487 - DNA, 1000 bp, Homo Sapiens; identical to SEQ ID NO: 119932

SEQ ID NO: 481488 - DNA, 1000 bp, Homo Sapiens
ttatatttttatttttttaagtaatcaagacaaatagtagaaaaagcattttatttatatggaaaaagctacagtaagatctgtaaaaggtgtcaatataatattgcctatacaggaaaaaattcaaatgtgaatagcaacaaataaaagttacacatcttcctacttagcagtgcaattaattcacattgcaataaagttaagtcaagtataacaaaatcaaaacaagtgtttctccataatcagtatgctgagaattacagtgtaaagatcatttcagatttaagaaatctgcaatcaatctacagaatatcctaagacaagggagacacagttaattcacttaattatcagccgttggggtttttcaatactgttcacaggaaaaaagtaatgagttgacatacatgtaaatagaatatatttagtctatacagtaaaaaaatacaaattataaagtgagctaacaaagaatgaaatctgaatacagatttataaaactgacatcttagacaacacatacagtatttctcatgtaaaaacatctagtttcagcaaaaaataatttggttgcttttcagctgcattgtagatcttgtaagctgaagatgcagatgtccaagtatcttaaaaaccataataaatgtctttctcaatgcatacaaaatgataaatgctctcatcacagtcttaagggtatttttggaagtttgttttgtcttgcttcagaaacacatttaaaatgggtaaaaatcaaatggtttcatggtacaatgaaacagtaaacagtgctcaatttactgctaatgttgaaaaaaacctagattttacagtactctggtatatatgaaaatgtttttgatttttacattgcatatttctgagtccattctcttgcatgtctgttgtatctgtagatacacaaaaaggatatagtaaaaacatacaaaattaatatttcagaagcatctgtctaataaaactatatattctaccttct

SEQ ID NO: 481489 - DNA, 1000 bp, Homo Sapiens; identical to SEQ ID NO: 119933

SEQ ID NO: 481490 - DNA, 1000 bp, Homo Sapiens; identical to SEQ ID NO: 308350

SEQ ID NO: 481491 - DNA, 1000 bp, Homo Sapiens; identical to SEQ ID NO: 308351

SEQ ID NO: 481492 - DNA, 1000 bp, Homo Sapiens; identical to SEQ ID NO: 308353

SEQ ID NO: 481493 - DNA, 1000 bp, Homo Sapiens; identical to SEQ ID NO: 308354

SEQ ID NO: 481494 - DNA, 1000 bp, Homo Sapiens; identical to SEQ ID NO: 308355

SEQ ID NO: 481495 - DNA, 1000 bp, Homo Sapiens
ggcaggagttgctgatatttattcaaacgtcatccatacaataaagaactctgcttttaaaattccatttacatcagcagttaaaaaaaagtgacagtggatgaaacatgaagctgtaaagtgcctttatggggagggtcacacaagggcgcgcagctgtgcgacgagacggaggcaccgcgcctgcacagtacatcagggacatcgcgggacacagcacgcgttccaaataacttacacatcagaggaaaagctgccgagtctctgcatgcttcctatttgattccgcaccctggaggtctggccagtgacggctacaagccgctgggagggtagcgtgaggggaatgcagccacgcctgcctccactgtgctggggctgggaaccgtgaggctgtgaggcggccctcccagcagcacggggacagcgaatatgtcctttccagcaagacacatatgtacacacatggtcagaggtgcacacatacaaaaacatctgcagactagacaccgaaagggcttcaaaagttttgaacagaatatgtttctgaaacacaagaagttggtaaaacagaagagtttttttccagttctgctgtgacttgaataaaatactctccccactttcacttctgtactcaaggtggtcaccaggtggcaggtggacctgggtgggaggcagggggcgcgtggggagtggagtggaggtgcggcctccgaggaggctgcagtgcagtgaggcaggggcagggctctctgagctatggtcggcagcactggtccacgccacaccctgcagaaactgcaactttgtattttctttaaaagcaataaaaatatcctaattcagtgaagctctttaaaaaaatcaagtccctgcatttttttttgtagaaaagaacgttaattgtttaaattatagtttaaattttcttttgaaaatgaaccctaggtagataaaggaatctccttggcttctaactgcttttggtggtggagac

SEQ ID NO: 481496 - DNA, 1000 bp, Homo Sapiens
atttctcaaattttattacatttattcatctgtgttcctgtctcttgtattttcatcctgttaatttctatggcttcccctctgtagagctctaaatggaacttcctttgtttatttagcacagactcaagcagactgcttgtcactggccaggactgggcaggtaaaagctggtcctatttcctttctgctcactcctaagtgccttttacaaatttcctttcttattcttgctcccctcctgcctcctgtagggctgctggactatagatagagatgcctcatttcaggctgtgcggggtgactcacacctgtaatcccagcactttgggaggctgaggcgggtggatcacctgaggtcaggagtttgagagcaaccggggcaacatggtgaaaacccgtctctactaaaaatgcaaaaattagccaggcgtcatggcgcatgcctgtaattccagctgcccgagaggcagaggcatgagaattgcttgaacccaggaggcagaggttgcagtgaactgagatcaaaccattgcactccagcctagatgaaaaaagatcaagactctgtctcaaaaaaaaaaataaataaaagtgagaaatctgctagaggaccaaggaagcagtaattatatttaagtgcatacttgagaagaaaaattaatttcctatgaagaataagccacctcagatgaggtagacccaacagagccctgagagaataaactcagccttcttccttgagattttctttccactgggtctgagaacagcaggaggaaaagtgtataaattcagaatgcaagggggaagcacaaagtattttaaaaatacttttaagtggcaaagtcaatgctctttcaaatccttcattgttcacaactgattttaaagatactaacaatttaagagtacagcttttaaaataattcctccttcttgtggtgtccaggagcttgcttgacaggtacctttttttcactcaaatgatcagaacaca

SEQ ID NO: 481497 - DNA, 498 bp, Homo Sapiens; identical to SEQ ID NO: 308357

SEQ ID NO: 481498 - DNA, 1000 bp, Homo Sapiens; identical to SEQ ID NO: 308358

SEQ ID NO: 481499 - DNA, 1000 bp, Homo Sapiens; identical to SEQ ID NO: 308359

SEQ ID NO: 481500 - DNA, 1000 bp, Homo Sapiens; identical to SEQ ID NO: 308360

SEQ ID NO: 481501 - DNA, 1000 bp, Homo Sapiens; identical to SEQ ID NO: 308361

SEQ ID NO: 481502 - DNA, 1000 bp, Homo Sapiens
ggatcctttgggctctgttctctggagagccctgactgctccactctgctgccttcctcacattttctcccctgctcaccctactcctccatgccactctctttgcttggtccccaaacaccaggccgacccctgcccttggccttgcacttgccactccgcctgcaggaccccatcccccagatatccccatggctcactccccacctccttcagatgaagcctgtactggattgccctattcaaaattgcagccatcccccgccagctgccccattctctgtaccctgctctgctgttttcttttgtccacagcacatcaccctttaacatacagtgtcatttattggttagttttgtatgttgtttattgtgtgtctccaccactagggtgcaagtcctatgagggaagcagttcctgtctattttgtctgctgatgtatcccaggtgcttagcacagagtaagcacccaagggtacctgtgggaccaaaatgaataagcagtctggggggggcagtgaggaggggctagctgggagtgagatggggtcctgggactgctcagctgtggggctgggttaatgagtggggtctgtgtgggcagtgattggtaggactgggaggatcaatggtaggctaatggggccagcaatttgggcacctctgcagggtgcattaaggagactctggcttttagtgactgtgggaggaatgagtatcttgcccaaggtcactcatctagcagagctggagttgacctcaagaagacttaaccatgacacagtgcaaggtcaagctgtgaaagctgacttaaagaagtacacagggcatgggcaagacaaggtctgtgtgccctggaagttttacctgtcttacctgtctgcagaccagaatggaaaaaataactcagatgttgatactacaggtatattcagtatttgagagctctgaccagacccaatctggcagattgtatcagtgcacagtgcctggggccgt

SEQ ID NO: 481503 - DNA, 1000 bp, Homo Sapiens
aaaaatatttgtagaatacagtaactggaggaaaaaggtacagtgcaaaaaggtaacagtcgtcattgtttgaagattcttaaatctggttacccttgaaagcattctgagctgcactagatgctgcagttgaagctgcatttgcagctgcggtctggacagttttgttggacatcacacctgttgcaaactcctgttgggccttctcaaaactagcacctgttgtgcgatatagtccatgtacttttttgaacataactagtgagatgactgctgatgctgtgaaaagtgctgctatgattatcatcatgattccaacaggaatattttggttgagaccagtaagggatgaaatcaacccacaattgccccagttatgaaatcctgcagcttggagtacatgtacagcaaactgacaaatatagacgaagaagaatacaaagaatctaaatgaactgtcactcctgaaagctccataaagtggtctgtaccaacagacaaatgaacaaggagtaaaaagcaagaaccacaggatactcaatccaaaatcaaccgctcttgcagaatcaacacaaaaccaagccaagcatccgaagatatttagaaacagtgttactgcatggaacatccacaagtagtacataagctttactgtcttttggaattctacaggaatgtctacagaaaaatcctgatagaaacaaggtccgacaggaaaattgctaggaagaggtggccaattattttttctaccatgttgactgaggttttgcatttctcgttcccgacgatctaattctgcggcttttctttctagctcttcctggcgcttaagaagttcagcttgggccaatgcatgttcctttgcaatctgtgtataagctggatgttcctctgttggtttcattattgctggttgtgtattgggtacattaggcatcttcacaccgcctggtggaggtgttctagaatccgagaatggattatattcatcaagtcc

SEQ ID NO: 481504 - DNA, 1000 bp, Homo Sapiens; identical to SEQ ID NO: 308362

SEQ ID NO: 481505 - DNA, 1000 bp, Homo Sapiens
gaggccattatccttagcaaactaacacagaaaaccaaatgccacatgttctcactcatgagtgggagctaaatgatgagaacacatggacacatacaggggaacacacacactggagccttttggaggaaggagggtgggaagagggagaggatcaagaaaatcagctaatgggtactagggttaatacttgggtaataaaataatctgtacaacacagacccccatgacacaagtttacccatgtaacaaacttaaacttgtaccccttaacttaaaagttaaaaaaaatccattccaagtggagaaaaatgaatgacctataactacacaaatgtattatgaaaaacataactttgagtgaaagaatagttacaaggcaaatgtataattggattgtatttatataaaatgcaaaatctggcaaaactaagtaatgtactacttagggatacatagacaggtataaaacctccaaaggggcgaggcgcggtggctcacacctgtaatcccagcactttgggaggccgaggcgggcggatcacgaggtcaggagatcgaggccatcctggctaacacagtgaaaccccgtctctactaaaaatacaaaaaaattagccaggcgtggtggcgggcgcctgtagtcccagctactagggagactgaggcaggagaatggcgtgaacccaggaggcggagcttgcagccagccgagatgcgaggtggcgccactgcactccagcctgggcgacagagcgagactccgtctcaaaaaaaaaaaaaaaaaaaaaaactccaaaggaagcatggaaatgatcaatgtatgattcacaatatttatgggttactgctcagtgagggaagagtgctgccatcactatgtggtatataaaaggctctgaagaatagttttactatctcttgctcttaatgttctgtacacaggtgttcatttgttgcccattaacatgtgcatgttcatctgcattaaatcttttta

SEQ ID NO: 481506 - DNA, 299 bp, Homo Sapiens
atagaaacagcaggaaaaaagttgttgggtgggaagtagaaaaggaggggatagaaaatagaatcagagaagggagtaatgtctgttaggataaatgagttaagggtgactttggataaagtcaatccccacagtaatactatacctaacagttggctgtgttcccctgtgatggagttctgactcaggtctgaaaaacaaacaattgaaaagaaaagaaaaaaatgaatgatcaaaacaaataatttctttaaaatcagcaacaaaagtcaaccaaggaaataagcaaaaaaatttaa

SEQ ID NO: 481507 - DNA, 409 bp, Homo Sapiens
ttgggctaacctggaatactttattccaacgacacgtaaatactggtaatgtgaccagcagtccggacagcccacccgtttgcctagcttggtgcttatgttctcctctttaagcattagggtcttacctgtaatctcttttcaagaaattgctttccaccttccaaaccatatgaatgttcataaggatagctccaatctcgaatcaaaaacattaatgtctatacacagaaaaaataaaaattgtttattttacaataaagaaaatttacgaaaaaatcacaactcttaacaattgaagcctctcttactctcctaaacaatccttatcaaaagttatagtaactaaatggtcagtactggtcatggttatatcaaggacccacttaaacaacattctcaggcccta

SEQ ID NO: 481508 - DNA, 1000 bp, Homo Sapiens; identical to SEQ ID NO: 119936

SEQ ID NO: 481509 - DNA, 1000 bp, Homo Sapiens
agcactgcactgatgtagaccttccagtcgcccatcgcgctccgagtgcgcccagccgcctcgcacctctcggggaaatatagaggcgccacgcggggaaggcctgcggcgctgtgaggcaggctgggcggggctgtgacgtcacacaaggcgccgtcccggagcgaccacccaggctggggcacgtggggcgtgggcgtttagtgctgtcgcagttctaaggttatcctgtaggatgggtttggcagagcgcagcggctcactcctgtaatcccagcgctttgggaggccgaggcgggcggatcgcttgaactcagtagcgagattatagtaaactattataggatcgtgtcgctgcacgccagcctgagccacagagcgaggccccgtctctaaaaaagcaaaaacaaattttaattaaaaaaaatttttttgagatgaggtctcactatgttgcccaggcgggtcaggaagtcttgagctcaaacaatcctcccgcctcagcctctcaaagtgacgagattacaggcgtgaaccaccgcatctggccaatctatttttaattttaaaaagctggttttgtgaaaaaaggatgttgtgtctggacagccagaccttcacttgtaagggaaccaaccattcaacccccagattgtggttcttaagcatgagagaacatcagaatcccccgcaaggctgttaaacagattgctgggccccaccccagactttctgttcagcagtataaagtgtagcccgagaatttgttatgtgtaacaagttccctggtgatggtactgctagccaagggactctcagacccactacactagtgcgtgttggggtggggacaacgatatgtcacccagcccttagggtccacgccacagtcaatgctctttttttctattttcttttttcttttctttctgtctctctctttccctccctctgttccttccttccttccttcctgccggttcaagtgattctcctgcct

SEQ ID NO: 481510 - DNA, 1000 bp, Homo Sapiens
gtttacagttccagaagtgcgtcgaaatggattacataactgctcttttattcctggtgttcacatctgtcccaggctgacacctgctcttggctggcccactttggtatgggctttaatttcactaccccaaacacgatactgtcatctgctttataataatgctcaagatgcctgataaaaatctcattttgcagccagacaagccttgaatccttttggcactaactgcaaaggaagatttttttctctagatatgcattagcagctagtgctccagttagaagcacgaactataaccttgataagtaaacagcagctggtggttaacaagtggatcgtcatgttcagtagtttatacattatgtgagaagtaacgttctgattctttttcttacacagaattggcagagggggtcgatttgggaggaaaggtgtggctataaactttgttactgaagaagacaagaggattcttcgtgacattgagactttctacaatactacagtggaggagatgcccatgaatgtggctgaccttatttaattcctgggatgagagttttggatgcagtgctcgctgttgctgaataggcgatcacaacgtgcattgtgcttctttctttgggaatatttgaatcttgtctcaatgctcataacggatcagaaatacagattttgatagcaaagcgacgttagtcgtgagctcttgtgaggaaagtcattggctttatcctctttagagttagactgttggggtgggtataaaagatggggtctgtaaaatctttctttcttagaaatttatttcctagttctgtagaaatggttgtattagatgttctctatcatttaataatatacttgtggactaaaagatataagtgctgtataaaatcagccaattatgttaaactagcatatctgcctttattgtgtttgtcattagcctgagtagaaaggcctttaaaatttttttagaaagcatttgaatgcattt

SEQ ID NO: 481511 - DNA, 1000 bp, Homo Sapiens; identical to SEQ ID NO: 308368

SEQ ID NO: 481512 - DNA, 1000 bp, Homo Sapiens; identical to SEQ ID NO: 308369

SEQ ID NO: 481513 - DNA, 1000 bp, Homo Sapiens
ggtacctgtaatcccagctacttgggaggctgaggcaggagaatcacttgaacccagaaggcagaggttgcagtgagccaagattgcgccattgcatcctgggcaacacagccagactctatctcaaaaaataaataaataaataaaaataagaattttttattcttgccttatttcgtagcaaacataaaaccatcctgattttaaaagccaacactgttctttctcctttttccttggatcacaagttcatacagagtcaagcaagtgccccaaagaaaaaccccaaaattgaaaacaagtgtattcccttcagaaaaatcaaagctagaatgtttagctattgaagtgttttcccccagactgagatcaagtgacttcactgcagtggctcaagagtggatgactccctccttccaaataaagcacttattgctaattagcaggccagaggcttagactggatctctcataattggagacttcaaagtgttcagaacttcaagcctggcctatgaagtaaaaaaaaaaaaaaaattttttttaagtagaattgcaattttatttttctccagagaagtttttcttcagtccttaacaactccgctccttatatgggctttggtggaggtcatggggcagcacctgcaggtctacgttggggtggaggtgttcggtccttgcctgcttcatgagctcaattcctcaccactgtgctgtgaatggcacaactcacatggtaatgtagcttcacatccagcctgggaagtacacaggcgtcaaggatgctcatttcagaaacatcgctgactgctgcggcctctacgtttcaaatgatgaatttcttagtagccttgtcattgggcacacaacaaccacagttcatacagcaaatgggctgcagtgaacagtgcacacctggttgtggacctctttggcacgaccattgcttcttctttgttatcttggaggtgcaggcccaagaaagatgaagtaaaaa

SEQ ID NO: 481514 - DNA, 1000 bp, Homo Sapiens; identical to SEQ ID NO: 308371

SEQ ID NO: 481515 - DNA, 1000 bp, Homo Sapiens
tggtgaaaataaaatctgaaaatagataaatatagaataaagctcatgagatttacctgtctcgtcttgcacttagaactgaagactgtccattcactatggaatgatgagttattggtggtgatgctttggaagtgttggaggaggtagtcgaggaggaattgttagtagtgaggtctagccctccatgtttaatgccattgtcttccatactgtgaactccagtcacttctttccataactgctgaatctcagcaggacttaagccagctataaaatgaaagaaagcttcactagcataacaaggtaaaggtaaagtttatataatgagctttgtgttattaatagattaataccaacaacaacagtgatgttacctgcataaattaatatacaacaaaaaatcacttttacactatcagcaccaaagcttttgtcttgaaaaacaatcatttattttctaaagagtaccaatttgggaatagtatggggaataatgccatatgaaattactgagaataatatcaagcattaaaaaaaaatccctgcatgttccatttaaaaattgaactagggccaggcatggtggctcacgcctgtaatcccagcactctgggaggctgaggtgggtgaatcacttgaggccaggagttcgagaccagcctggccaacatggtgaaaccctgtctctactaaaaatacaaaaatgagctgggtgtgatgtcacatacctgtaatcccagctactcaggaggttgaggcgggagaattgcctgaacctgggaggcagaggttgcagtgagctgagattgtaccactgcactctagcctgggtgagagtgagaccctctctcaaacaaaaacaaaaaaataaaaaataaaaataaataaataaataaatacaaataaaaattgaactattcaacttttaagagtagtttttacctattgctagtattaaggtttgtttttaaatcagtgaggaactgaaagagaaaca

SEQ ID NO: 481516 - DNA, 1000 bp, Homo Sapiens
tgaaaaggttctggatggctcagccaagtggaaaaatgaaataaaagatggatatggagaaggtggctggagtggggagatgtgcgcagctcaacgcctgcctccaaactggcctccttactaccagcagagcctagttttatgaaaaagcctcctatgagatgccttgtctgaggtctctagagcatatagtcctcataataaacttggctctttccacttggacaatagcaaagcggttggtcttattgctggcgctttttacatgacaataactcatccgtctattgggctggcactggggaactgagctgtccaacctccctatcattgattcctgcatctctaattagaatttaataccacaccattacgcaccgagcccctgatcctcccttctaaccagctccctgccctttaattcaatcacactacttggaaataatgaaagttgggtgacgattctccctgatccaatttccccgagcttttaagcctttttaactgatcatataccttaggcataaattgagatagtgtgtgtgttttcccccttcttcgtcctcttctttttttccccctcggttagggagaagaaaccttgatgtcatagaaaacctgtttgtaagagtgttacacgctcaatttaacagcaagcctaccccccgaagtgcatgaaatggtataaaggactgggacattggcaagactcaggcgccctgtaacatagagtaagtgggccaagggggtttatgtgaacgataagcggatttctttaaaaatacacctgctagagggggttaaaaaaaagagagacagagagaaagcatcttataaattgcatttcttcttgcagctaaatgtgctttcaagagactcagggtatacagccacttaaaaataataataaaaaaatctgaggaaagctttcgaatgtgaaacatctggattctcgaccgttgtgttctttgctctcagttctgtctgtttgcattagcgc

SEQ ID NO: 481517 - DNA, 1000 bp, Homo Sapiens
aatgtttgacttatcttttaatatttagataagagatgatacttaacattcacaagttactgtaaatgctggggaccataagcatggggcaggccacggtaaagatcattttgaatgggcaagtctttcaatttcccttacatcacaccaagcaggcaaagcctaaatacagggcaggacttgcctatgtgatgtaccattccagccctccttttcaaagaaaacttgagcagggaccctgggataccaccagcgatggtgggactcccttttgcaatccaaataagcacgatctaaatgagtccaggttggagcagataaggaatggggttgaaaaggagatgtgttcttgaaatcggccaatttcatagcctggaggagacatttgtggttagctgagtcacactgccttgggattagccagctctgctttctgtttcaacaataaaaagtcttgcaaagctgctggcatgtgagacagaggtatccagaaaattttggcatcttttccagcggcataatgagtcttagggaagagacttgttagagcgtggtccatgcactctaccaccggagagaggtccatgttcacataggatttattgcctttcagtttgtctagacttttttcaatgtaaccttctccatattgttgtttgatgtctggagacagctgctcccaaatggcgagttttttttcaattacctttactggatctgccaagtttgttttgaacaatcctggttcaatgcatgagacgtgcacaccaaaagctttcatgtcccgtcttaagctgtcattgaaaccttccactgcatatttggatggagtatagccccctccaacgattgcaaggcgacctccaacactggagacattaataactctcccttgagctttcttgaccaaaggaagcatatttagtgtcacactgatgagtccaaacaggttcacttcaataggttctctgtagtcctctagtgtcagccagtcagtggg

SEQ ID NO: 481518 - DNA, 1000 bp, Homo Sapiens; identical to SEQ ID NO: 308373

SEQ ID NO: 481519 - DNA, 1000 bp, Homo Sapiens
ctgcttcattattaattgggaactctcagtttcccctcttttgtcccctggatcagttcttcaatctcattctcaaggggttgttcatattctgtggctaactgcttatcaaattccatatcccaaagtgaaggtgatgtgtctgtatagtaagacattttaaataagaacaagtcaatgtaaatatctttttaaaaaatgttataaccaatcctgaattgatcgtgtatttttaataccttgacactcataattacagtatataataaaaagttactcacggagagataacagcaacaaaaattatattaaagactataactaggccaggcactgtggctcatgcctgtaatcccagcactttgggaagccaaggtggggaggtcaggagttcaataccagcctgaccaacatggtgaaaccccatctctacttaaaatacaaaaaattagctgggcacagtggtgtgtgcctgtaatcccagctacttgggaggctgaggcaggagaaccgcttgaacccaggaggcggaggttacagtaagccaagatcgggccactgcattccgacctgggtgatagagccagattctgtctcaaaaaataaataaataaataaagactataactacaataatggcaagcttaactttggttttacaacaatgccaggtaatcactaccccttctactggaaaaaaaaataaatttgtattttgtttaaaggtatttttatgaatatgaatattttttatacaatatgtgacttatttttaaactctagactgtttattttaactctatcaaaattagtcactaatgtactactgttaacaaccaaagaagttagatcaacagaataacaataaaactgctaatgaacacttgagtacttcctctgtgcttaaatttttttatgcattagtacatttaatctgcacaaccaaccctgtgagttggctaattaccaccatcatattacatgtttcaataactttttt

SEQ ID NO: 481520 - DNA, 1000 bp, Homo Sapiens
taacaaagtaataacccccagattgatggtctgtagtgcaacagaagtaaacactgaaaacacttaaatatttccatctggaaacagtaaattaaacattgtatttacctgtggtgacagcttctcagttctgagcttgtcttgccacaaactgttgagtccacagagcagacagggccctgagcttcagcctggcagtaagaaggtgaaggaggaagtgattacggttgttctctggatgccccccaactcttcaccttggaagaggaaagtcatgctgaccctgccccgcaacgacacgggtgtcgcagggtccttcccaggaaaatcccgtgtccttgccctgacccagttccccaaggcacccttatcccaaggaggctgggagaggaggggcctccctggtttcctggcaggggtcggctgaggctgacgtgggcgtgcagccccggaggtcccacgaagcccaggccattggacaactgtgggtttttcttggaaagaatcctgacacttggagcacacttcctctcttttaacttttaaaaaagacttcagaaaagcacaggcgtgcagttgtgcccggttggggagcgtgagggggcagggccgaccctcctgacttccactggcaccaccccgcgcccctccagcttcacccgcaccacgcgggccgcgcagcccgggactccggaaagacctgggcgcccgaccctcagcggccccgaccgggagcgacgtggcgcggcttccgcagagaagccacccggcccagcgcagcctgtccggggtcgccccgccgcgttggggcacaaagtgggaaccgttcctcaaaggtggtcgcagctggaggaacaaacacgcgcgtctccgtccgacggcagaagccgggcgcacccacccagggtcggtctgtccggggcccgggtttcctcgcctcggagatccctggaggtctcggaaagcaccttctgagtcggcgacgccccagctccgctgc

SEQ ID NO: 481521 - DNA, 1000 bp, Homo Sapiens; identical to SEQ ID NO: 308376

SEQ ID NO: 481522 - DNA, 1000 bp, Homo Sapiens
  misc_feature (561)..(561): n is a, c, g, or t
aaaaccagctctaatcaagtgtttctgtaagggaatgttctgggttccttggcttataggttaccttgtgccatacctttgaaacaagggacctgtccaggtttctttttaatggccaacttacttctaatgctggccagtctatcttacacaaagttttaagttttcctggtgtcatagcactccatagtctccctcagattcttttttgaaatttgtcaacatagttcctagtggggtgggcttattcgtgcctgacctatgcttcttcaagacaaaacaccacgctcacaccacaaacacaccacaaaacaaagaaccggtaaaaagggcgcacacacagttttgcagtttgcaccaaaccaaaatcagagtatccagaaatccaagccaggtcaaaaccaaaaccaaagtatcaagcaatccaagtcaagtcaaaaataaaaaccaaagtgccaggagaggcacaccatgggtgatcaggccacacttccactcaaatggagtaggcaagttcccaagaccaatcctgtcaagcaattcaaacccaaaaaccaaagngccaataaaggcaacgccatgggtgatcaggccatgcttccactcaaaatggagtgggcaagtttcaaagactactcttaccaagttttagatgtccagactcccaagtgcccgttccttcccggtgttcagccactgcgttgatcctccatgggggcctgccatacagtgctctggcgaggcgtcccagtggggcaaatgcctaaccaggagcgccctcaggatccgtgttgctcgggctggttggagtcccctgcagggatgttccacagggcaggtttaagccgcctaaggagctgccttgaccatccgccattcacctcgcttcccagtcagggaaccaagaaatcgagctgcagacaaaacttatcagacaccgagttaaagaaggaaggggtttattaggccaggggcatcggcaagactccggtctcaagag

SEQ ID NO: 481523 - DNA, 1000 bp, Homo Sapiens; identical to SEQ ID NO: 308377

SEQ ID NO: 481524 - DNA, 1000 bp, Homo Sapiens
tctgcattttgagatagccagggaagagggccatgtgcaaaggagatcgctgcaggtggaatgctgggtgctgccagagggggttgtgcaaggcaccaggaagccctgagaggagagctgttaacctagtggagatctggggacagtagtacagaggtgatgactcataggctgggcctgaaaggtagacagcagagagggtagagaaggtagacaggggtggtctagggacagcaaaggcagggcaggtgtcagcatgaaggagactgactcagtggcgtctggcgtgcgtggagggcagggttagacatgagagggaaagaggaaggtggttgggcagggacggtacttcaggaaggtcagtctgcagaccagaaaggaaggtggacagaaggcagggagccgagtgaggatgtaggggtgcagggggcagggatgaggcctgagctctgggagtagctatagggatgggttcaaggagatagtcaagacaaactgtagggctgaagagtcggggctgcttccctcaggcagttgggtggctcagaagagttcacagcagagttaggggcagaggaaggcacaggtgaggcttctggtacctgtgttactggtggagggtcttgactaggaattttccaggtccttggcgttttgaacaaagtagcagaggggcagacgtggtaatccccacactttgggaggcctggatgggcagatcacttgaggtcagtccaagaccggcctggccaacgtggtgaaacccgtctctactaaaaaaaaaaaaagtaaaaataaaaagagtagcaggggaatgaaatgcaggaatgaagcagtgaaagcaggaattaaagtgagaaagcactcctcagggtgggagtgggccggagcaaggaactcaaaggcccagttacaaagttctctgggctttaggtaccccatttgaggttcttatcagctactccttatctggacgaaggatttagtctgtggctaatta

SEQ ID NO: 481525 - DNA, 1000 bp, Homo Sapiens
gaattcattgtatactagttgctatgtggagagaaaatcagaaccctgcgtttaagacatttagaaaacaaacaagaacacagaacagtcttccgtgcaaagtaagcaaatactttcttgtggatttagtcacgaggaaaagatcccagagaagaatgccaagcatatagtaagtttaataatcagaacaaaatgggatcaattaggaaaaactatatacaggaaatattttatatggtagttgatcctttttatgctgactattttttagagtttaaaatatgattattctgcagtcttctgagttgaaattattcaagtgcccatcaggttcagaaattcagaggagtatactgaataatttactgatattccatgatatgtttaatgtgttgttcctcactagcaattcatagttcaatacgctgtgcaaaattgtaatgaatgatgtgctctaaagcagcatttccatcaatatttgtacgtgtatccacaacagatgcctcacatgatttgtgtgtctaattttcactgaatccacttatgccttcggcacacccaacaagtagtaatcaagaggttcaatctattaaatatacatatatatattgtctccagactttgtggtcacttgaattttatttctttaagattcacctactcgaagtcacataagcattttaaccatgtatattataccaagtaaaaattaatactaaaatgaggtaatggagaaaacaaaattagatttcttttgctttcaaataatcccacaccaaaacattttgtgaaaatgaagtgatttttaatttataaataaaagactctctaaatgattttcaggatgtatattacaagtttagttttaaatagacttaaatttataacaggtcttacaatgatttcaataaataggcactccagagcacaatgtgtacgtacaacaatcacgtgttgacctcttaatattccaaggggatcaaaatctttttcaaacaca

SEQ ID NO: 481526 - DNA, 1000 bp, Homo Sapiens; identical to SEQ ID NO: 308378

SEQ ID NO: 481527 - DNA, 1000 bp, Homo Sapiens; identical to SEQ ID NO: 308379

SEQ ID NO: 481528 - DNA, 1000 bp, Homo Sapiens; identical to SEQ ID NO: 308380

SEQ ID NO: 481529 - DNA, 1000 bp, Homo Sapiens; identical to SEQ ID NO: 308381

SEQ ID NO: 481530 - DNA, 1000 bp, Homo Sapiens
gatctccagaggcatatactgtcctgccgactggtctgctttctgtctgattgaaattggaggctcaaagccaagaccttctcacttgcagtgaagaacccttatgggacaaagttttcccctcaacctgctctatcatgagctcctcctgctaagtggcagagcttagcccgtgaatcagaggatacgctacatttcaaaccttaggagcagtcctgtcaccaaaattcagctggtcattgtcagtttaactacccactacgtaaccactcacgtatgaacctgcaacagccaccaatcaagttgaattctcaaatatttgctacttcatcctcaatgttttcccatttctttttttttttttttttgagacggagtctagctctgtcgcccaggctggagtgcagtggcgcgatcttggctcactgcaagctccgcctcccgggttcacgccattctcctgcctcagcctcccaagtagctgggactacaggcgcccgccaccacgcccggctaattttttgtatttttagtagagacgcggttttaccgtgttagccaggatggtctcgatctcctgaccttgtgatccgcccgcctcggcctcccaaagtgctgggatgacaggtgtgagccaccgtgccgggccagtgttttcccatttcacgtgctgcgtgtgaaaatccactgcgtgcgacacttgcgctatgtgcactttatgtacacatctcatactttgttaaaaaggcactttcagacaaacatattatttatttatttagagacatggttcactctgtcacccaggctggagtgcagtggtgtggtctctgctcaccgcaacctccaccttctgggttcaagtgattctcctgcctcagcctcccaagtagctgggattacaggtgcaggccaccacgcccagctcatttttttgtattttttttttgagatggagttttgctttttgttgcccaggctggagtgcaatggcgtgatc

SEQ ID NO: 481531 - DNA, 1000 bp, Homo Sapiens; identical to SEQ ID NO: 119937

SEQ ID NO: 481532 - DNA, 1000 bp, Homo Sapiens
tctgttccatcctttttcttgtgtgggtgagaaagggcaaccacattaaatctctacatctgcaaatcctgccccttagtcacattatttttgtggcttgatggcttttattcctttccacttttcctttgtgaatattgctttcttcgttatgcctttcactggaatgggtgaggattctgggatcctttatttagcagaaacctcatgacaggatcctctatacctaggcggcttcttttagtttctgagcaataaccctgtcatccaggtggaatcacaaccatctttttatatacacgaagtcctcacttcgttttggaattccctgaaaactgactttatggaaacaatgtacaggaggtcctccaacaccattggttgttcaaagttgtgtagttatactgttgatgaaaaataagtggttcactatacatgattttgcttcaaggtgaagtttccaagagactttcaaagatgttttttgaggacatactgtacatcaaattcatatcctcttccagagttcatgtggaatttctttataaactgcttctagagaatccatttaggcaggttatgtatagagatccatgttgccgttcctcaatcttggttttgagtcaaatcacctggggagcttacaaatgatgaggcctgggtctcaatacctgagattctggtttccttgcacctgtgtgagtatgtggattttttttttttttttttcttttaaagcaccagaggtggttccaatgacgaatttttaggggcatcaagctccaatgagtaagaacagaaattaattgtaatatttcttcaaatattatcttcaaatgcattgtccatcaacaccatacaaatgtttattatgctgttttttcttaacatttcgcattttctatttctttcttttccttttttttttttttgagtcagagtttcactcttgtttcccaggctggagttcaatggcacggtctcggctcactgcaacctc

SEQ ID NO: 481533 - DNA, 1000 bp, Homo Sapiens
ctcctggggctgtgtcacaggccattggtcactcatatttgggtcagaataaatctcttcaactatttcagaatttgactcttttcttcaagaaactggcccctccacccttagcttcctctcactgtgtatacagagcacccttcctgagcacgtctgattgaatttctccaaataagcaccttcagtaacccagctccacctactcggcaacatctgaacaaactcagctccgcacccaaagcccttctagttccatcctaagtcaatgcttctcaaactttaaagtgcatcagaatcacctggaggggctgttaaaatgcagattcctggccccagcttccagagagtgctcctcagttggtctggggtggggaccccaaacttgcatttttaacaagtttccaggtgaggctgatgctggtggcttgtggaccacagcttaggtagcactggctaagataccttatcccaggacccttcatgcactctccctccatccagggagctgcttactctgccctcagcaccccatgcgcttgagcctttgcccagcctggtcctggtccaggaattccctgctgccaagtctgatgcaatgggtcagatcctggaacctcctaactcaggataaagttgagaggttgtgctgctttttaaagggaaagccttattgggatttgaaccagaactggaaggactgtagtaaaatgcagatatttgggcccacccccagatacaggcctcgctgtgggacatgctgctatggtcactttctccatgtacagatgaacaaagggtggcccagagataggaagtgactttcccaagggcacacagcacattagacgagaggctgaagaggaagtcaagtttcaagtctccctcctgcgcagttctgtgcttcttgtgctgccttttccaagcttaaggggctctgctttttccccttccctcattctactttcttgtgaccccagctgggccccagcatttccag

SEQ ID NO: 481534 - DNA, 1000 bp, Homo Sapiens
tcagattgttactgtgtctgtgtagaaagaagtagacatgggagactccattttgttctgtactaagaaaaattcttctgccttgggatgctgttaatctataaccttacccccaaccccgtgctctctgaaccatgtgctgtatccactcagggttaaatggattaagggtggtgcaagatgtgctttgttaaacagatgcttgaaggcagcatgctcgttaagagtcatcaccactccctaatctctagtacccagggacacaaacactgcggaaggccgcagggtcctctgtctaggaaaaccagagacccttgttcacatgtttatctgctgaccttccctcagctattgtcctatgaccctgccaaatccccctctctgagaaacacccaagaatgattaataaatactaaaaaaaaaataaaaaaaaagagaaatgtaaatcaaaaccacagtgagataccatctcacatcagtcagaatggctattattaaaaagtaaaaaaaaaatacaggtgctggcgaggttgcagagaaaaaggaatgcttatacagcgttgattggggtgtaaattagttcacccattgtggaaaaccatgtggcaattcctcaaagacctaaaaatggagctaatatttgacccagccaccccattactggttatatacccaaaagaatataaatcattctaacataaagacacatgcatgcacatgcccattgcagcactattaattgcaaagatgtggaacaaacataatgggccatcattggtagattggatgaagaaaatgtggtacatacacagcatggaatactattcagccataaaaaagaataagaccatgtcctttgcagaaacatggatggagccagaggccattatccttagcaaactaacacaggaacggaaaaccaaacaccacatgttctcacttgtaagtgggagctaaatgatgagaacacacaaacacatagagaggaacaacagacacg

SEQ ID NO: 481535 - DNA, 1000 bp, Homo Sapiens
tctggtggaaacaggctgccaggccctgcccctggagtctttctttgaataggcctggggtggggcccaagaatgagcagaagaacaggtttcctggtgaggctgatgccgctggcccagggatcccacgttgaggacggagggctttgaggttttcatgcctgataatggccaggaacccttctcagtaggcattgaagaccagcagagtcccagaccccaggagagatgtcgtcagacggacacagaggcatcacggaattaaagtgaaaatgaagaaaggagctgagcatctgtttcatgactttcctgcgctgttttactaaagaggctgttcaggcccagtcagggcacgctatcatcaccaactacttgttgaactatgtcctgggtcttgaccttgaaggagggatgcgtttgggttgaaagccgccatgcagggtcgaaccgatcacatcggagccctgagctagtaggggcgggtgtccacacgagggtccctgccgtgggatgtcgccagaggagtggccacttacacgtccgcctcatgcagaggctcctggagcgcccctgccgggagcggttgggggaaaagtaccagcttgagctgcctccgctccacgagagggcgcagaagcccgagggctccaaaaactgcctgcagagggtcagggactgcgagctgtccgcgctgacgccgggcgccgtgcgtggcccagaggaccggggcgccctggaccacatagtcaggatgaccacgagcctctaacagccccgccgtggccttcgcgtgccagaccgtgtgccccgagaggaccctgtgcgtggggaagaggcggctggcggtgcaggaaatcctggcgactcaggaaattctggcggcgcggcgtggggtcggtgggggcggcaggcgcaggtggcgggcgaaacggagggcgcagagcagcacaagcggcctggcctagaggcggcgggctcccgtgaggaatccccaagagcc

SEQ ID NO: 481536 - DNA, 1000 bp, Homo Sapiens
agggatccttggagaatggagtccactgagatttcaagagagacgagcaggcctggcgcagtggctcatgcttgtaatcccagcactttgggaggccgaggtgggtggatcacatgaggtcaggagtttgagaccaggctggccaacatggtgaaactctgtctctactaaaaataaaaaaaaattagctgggcatggtggcaggcgcctgtaatcccagctactctggaggctgaggcaggagaattgcttgaacccagaggtggaggttgcagtgagccaaaattgtgccattgcactccagcttaggcagcaagagcgaaactccatctcaaagaaaaaaaaaaataatgagggggtctcaggcaagggagaagcaagactgggccacagaaatcagactgagggccttgggaagggagggagctgagcagcctggtcaggacagggatatgtggccatgcaagggtagacgtttaagtggcaaaacagggctcacctacagacaacctcaaaagtgaggcagaggcctgggctggctagactcagtgggaaaagccctcaggctcaggacaaccaaagagcatggagatgcactttccaattcagtgggcaggacgcttggggctgagaactggagtacacacgttcttagtgtgggaagagctttagaaattacaatcatgatgcttctgtgagctttccatttaaaaaaaaaaaaatctcatacaaccttaatacaaccctacaggaaagatgttttttttttttcccccattttatatgttaggaaacagagtctcaaacaggtcttaaataactagcccaagaccatataataaatggcagaactgggataaaactgaagaggtgatgctctaaagcctgtgctctcgacctccacactccttgatgagtgaaatgttgagctggtaggaatcggtagctttatatttcacaattgagagaaggtttgctgagggggtgaatcatccttttt

SEQ ID NO: 481537 - DNA, 1000 bp, Homo Sapiens
gatcatagctggccgggcgcagtggctcacgcctgtaatcccagcactttgggaggccgaggcgggtggatcacgaggtcaggagttcaagaccagcctggccaagatggtgaaaccccatctctactaaaaatacaaaaagtagccaggcatcgtggcaggcacctgtaatcccagctactcaggaggccgaggcagagaattgcttgaacctgggaggcataggcagagaattgcttgaacccgggaagcagaggttgcagtgagccgagatcgcaccactgcactccagcctgggcaacaaagcgagactctgtccaaaaaaaaaaaaaaaaaagaagattgatcatagctataggctttttgtggatttttaaaaatcagattgaagttgttcccttctatttctagtttgccgagagattttaaaatcaggaatgggccgggcacggtagctcacgcctgtaatcccagcactttgggaggctgaggcgggtgaatcacaatgtcaggagatcgagaccatcctggctaacacagtgaaaccctgtctctactaaaaatacaaaaaattagctgggcatggtggtgggcacctgtaattccagctacttgggaggctgaggcaggagaatctcttgaacccgggaggcggaggttgcagtgagcccagatcgtgccattgcactccaacctaagtgacagagcgagactctgtctcaaaaaaaaaaaaaaaaaaaaaaatcaggaatggataaaatatatgttaaattttgtcaagtgctttttctgcatccattgaaatgattccatggttttccttttttagttaattttttttatcgtctcgagatggcaactgagatcattgattttcagcttgaatttcaggtgaattatgctgagggattttccaatgttcattcaaccctgaagtcatgagatacacttcgtttggtcaaaatgtattatccttttaatatattgctagattcaatgc

SEQ ID NO: 481538 - DNA, 1000 bp, Homo Sapiens
taaggacaaccagaccctcctttcatgcattccccttcagagtcgctgctagttgcctggctcgagtgagtggcatttttcattttgccgctcagctgtcttggggcctgggggcggctcccacctctcttcctgcactctgccggccccctagaagaaacttctgatattgatgttgggccccacagccctgccattgcccaatgcactggctgagaagtgcctttcctgctcgcttttgtttttccagcctcctcctggtggcaaaacctgaatgtgaagctgtgattgcacatgttttgtaattatcactactcgatggtcgcttgtcattctgaaggcaagtaccccaaatttttctgtccgtgctttccacaagaaaaaagaaaaaaaaatgaaggataacacaggctgagttagagaaagtaatttataatgatttgcttctgaatatgcagcaatagtagctgtagatttccaaggcagataggtgagtttccggggcaacatattcaaatgagtttgataatcttgccatttggctccgttgggctgcgtgtgcgtgtgtgtttccagatgtgtggtaatggctgataaggaaggtctgcggctggggccaggtctgtgcagttcctgcttactgattgctaatgacagtcggagggtcggggccagaaagctcttctgatcggcagagcctctgagagcaggctgggtcggcggatggctcatcacatggtcgccagtgtggctcagggctccaatttctttttaatttttacttatttttgagatagggtttcactgtgtcgcccaggctggagtgcagtggcatgattctagctcactgcagcttcgacctcctgggcttaagtgatcctcccacctcagcctcccgagtagccaggaccacaggtgcatgccaccacatctggttattttttttttttattttttgtagagatagagttttgttgtattgctcaggctggcctcagac

SEQ ID NO: 481539 - DNA, 1000 bp, Homo Sapiens; identical to SEQ ID NO: 119938

SEQ ID NO: 481540 - DNA, 1000 bp, Homo Sapiens
cttccttgccctgcgccgccgcggccgcggccagcgcacagccccacagcagggcgaagcaggcgcgggctgcctggagctccatgccgcgcttctcgctctcggtccgatccccccgagcccggctcccgcacacccgcacgcctgcacgccggcctcggtgtccgctcccgcccgccggcctgcgcgcaacttctgcccctcctgccccgagtccttaatggaagttgggtgagaaccgactcctgttcattcatgccctgcgtgacgtcaccaacgcccgccctcaggaatgtctttaaaggggccgggctggcacccggaggagagggaggggaagtccggaggggtttggaggaggaccttggggccctctggactcgcgggctccccgcaggccttccaaagtttgagcgtctcaaagcgccagcgcccctacggattagcccccagggatctctgagcctggtatcctcggtggaaacgtttaatggttttgcgctgagccatacccattctgcccttcacctctgagactgagctcaatgcgactgagctcaacgctggcctgaaggtctgagctgaaatggattgggggtccaataagcagttgcctcctaagcagcaggcctgggagagtggcccagaaatagacctggatgccctccttcctaaaacccttgaagagtatatcaagctgctgatggtcaaaaagagtatctctgttcagaagcctataagcctactatgatctgagaataggttcatttcctctgggaatggatcagacatgcactatcttatttattaataattctcatctgggaggcaggggtcatcatccccatgttacagaagaggagactgaggctccaagagcagaaacaacatgcccaaagggtgcacagctcacgggtagtagaagcaggatttgaatcctggtggtctctgcttgaaccactgcttctttttggggaagggggcaaggggcacccctggc

SEQ ID NO: 481541 - DNA, 1000 bp, Homo Sapiens; identical to SEQ ID NO: 308383

SEQ ID NO: 481542 - DNA, 1000 bp, Homo Sapiens; identical to SEQ ID NO: 308384

SEQ ID NO: 481543 - DNA, 1000 bp, Homo Sapiens; identical to SEQ ID NO: 308385

SEQ ID NO: 481544 - DNA, 1000 bp, Homo Sapiens
agctctggggattgttgacttacccagtctctgagctgtggctcctgtgagaactgatccagctggttgttctggggttcaggggcagctggtctcccctacttggaactgtttaaataaagcttcccttggtgggtctggccatgcagaaacccacagattgacacatggtccacttgtgcaatcatcctttttatttgatgacttggctgagcaacggatacccaaggacagccctgctgctctttctgctatacggactctaattccaagtcatcctgtgttagacagagttttgccggtgggatctggactctgggtgaaaactatacgctgctggcagaatgaccacagattttataactgtcctctggcaggcccctaaatgactaaatgacacgaaggcaggcatagtagttaggagaaatagagccacagagggctgtttgcccaggagaaacccagcttcccttccatttttagtaatatccttggttctctctcacataaatgctctccatctcatccaccactcttgctggaaacttgagctattaatttcttggggcacaagattctgtagataattaaaacaatctgctccatacaattgaggaattttttttctttactcctcttgcattggatccactttctcttaagtcttgccctgattattgattccactttgtgtaaagttacataacctaaaaacacaccgaggacagttgtaaaatctggcagaggatgaatgaacatttggtgtcatgaaagattccaacctagcactcggtattcctgtgatcttttcagcctatggtattttatacaaaacagtgtgttctggggttgtcattcatcttcctggtaagtttcattttgtgatattaacaagaatatggttctgtatttacaaatgaacatttaaggacagagcactgtattcctgaaagtatagaggtcagtgtacagtttgatacacaaagcatacatttattct

SEQ ID NO: 481545 - DNA, 1000 bp, Homo Sapiens
tgcttgaggaccagttattgtttatcttgagaaaatggatacagtaagttgtattcactttgctacataaaagagtaagatttttgtctctttgcagtctctttagtggatcaccagtgtatcacattccggtttaatgcttattcaataataacactgttttctttcttttctacccttgtgaagaggttttctgcgttggcaggggattttgtctttaattttatttccccaacaggggttagtttttccaaagtctcttcaccgtgtcccaccgcactgtcactccccccgtgtaacccatgccactgtgccctaaggatcagttttcaagtctccaccactagaatgcagctctctgagggtgaactgagctgagtcgtttgcatagggcctagatactgagagctagcagaaggaagcaagggaaggaaggagggaaggaaggaagggaaaggaaggaagggaggaaggaaggggggaaggaagggagggaggaaggaagggagggaggaagaaaggaccaactctgagaagtttccccctgactgctgggccctgaaaaataaataacagagactcaggtacacccaagagtgtctataaacaacaacaaaaactgcaaaccaaaaactagtttacaatactgaagttataggaaacaagcacaaaaggccattgggtggggctggatggagcatgatctggtccttaaagtatgcagatcgcctgggaggcccagcctatggagattgggaggagagggagatgctggtgactggagatggtgagagcctgggctggggtagtttttagtcatgggcttatggaccctcccctcttctccagctagctcaggcctttaagaggcaggcccaagaagggaaccccaggaagccctagaagctccccagcgcctccatcccatggacccggatcccctgcaggagggggaagttgagcagtggcccaaagacacagtcgtcctcctggcttgggg

SEQ ID NO: 481546 - DNA, 1000 bp, Homo Sapiens; identical to SEQ ID NO: 119939

SEQ ID NO: 481547 - DNA, 1000 bp, Homo Sapiens; identical to SEQ ID NO: 308387

SEQ ID NO: 481548 - DNA, 1000 bp, Homo Sapiens; identical to SEQ ID NO: 308388

SEQ ID NO: 481549 - DNA, 1000 bp, Homo Sapiens; identical to SEQ ID NO: 119940

SEQ ID NO: 481550 - DNA, 1000 bp, Homo Sapiens
  misc_feature (917)..(917): n is a, c, g, or t
gcagtttcacatgtttatttttggcaggaaggaaatcattgcaaaccttttgattgacaatactcgcccctggaaacgtgcacattccgcatgtagcatttcctaagtaatgctggattgtttatcacattcaaatgtcagcagaaatccatgactacccagacaccagcatctccactacccggggtgggggagggtgtgtcagtctgcagagaagctcctgggagaatggaataggaacagacatgatcaaagttacagtacagtaggaacagaggcagccagccaattttgcacagttaactgcaaggacgtcaagccattcactcttctcgaaccctggcatgccaactgtccagcacagcacctttaaaagcagaggcacaaacgtaggattgtttgaccatagggctgtgtggttctggattttttattagaaagccatctttaaaaatacagggttgtaaaatgttgccaggttacagacttacaggtttttttttttaacaccaaaagttcaaatgctgcaaccatgacaagtcagcatcattagggcatcctcgtgtccccagagacatctcatcaaaattgcaccacgtcaaaggagcttctcaccatcaactgtggcaggtggcattcctttttcagtatgcaaatgcattatttacaaacagctaatgcatggaaccacagaccaacacgtaggattccagaacaaatggaagacagagcattaacaacattgggagtgcctgtgcacttccactggaggcctggccagagaagtaataacatcatagtgggctgcagtccacaaacccaaggtgtcctgtcccagagctcaatgtcaaaaatacttctccagaagactacatttaaacctgacagaaaggagcatggaaactcaggaggtcagngttctcttttggctaaagagttgggcgtattttggtaacatgggaagtatatggcacagagaagtggctaacaggtttcatta

SEQ ID NO: 481551 - DNA, 1000 bp, Homo Sapiens
tgacagaattcttaaaatttccactgaagaaagggtaaataagaaagattataaatattttcatcctaggcaaatttcataattcctaaaaattatctcaactaaacattaaagccatgtcaaccaaaacaaaaagaaaaacagataaaagaataggatggagataaggtcaagtttgagaatcgcattttttttggggaagcatttgctaccataatagagattatgtgagctactttatttatttattcatcacaaaagcagtattaagtaagcattaacccccatgttacattttatcggtaaaggaactgaaaccagagaggttaagaagtttgcccaaggtaacagaacagagccagaattaaacttcactctctgacttccagaacccaagctcttaaaggtaatacagtacttcctttgataagaccttatatcaaatttagataggaaatctatgatcaccatatccaaaataagttttgtgtataatggcttacctgtggtcctgcaaagacactactgaggatccaggccaggccaaccatggactgtccgactttgctgttgcttttcaaagctaggggcctcgtgatagccagggagcggtccaggctgatcaccaccatcatgaaggctggggcatacatggagaaaagctttagataactgagaactttgcagagtaactctccagcataccattggactgtaatgttccacatcccatccagtggcatgacaatcagagtctccaacaggttggctaaggtcagatgttttaagagcagcttcattcttgagagctttttccctttctctttcttctgtgtccacttctgaagtttcaacaagaaagaagcattaaaggtcgcagagagcagaaaaaggaagaaagtaaccgtcactcggatctttccagacaaggtcagagtggggaggttgccctgcatcagtgggatgctgttgttgatggctgaacagtgattttgattct

SEQ ID NO: 481552 - DNA, 1000 bp, Homo Sapiens
gagctcaagaccagcctgggcaacatggcgagaccttgtctcttcaaaaaatacaaaaattaattggcatggtagtgcacacctgtagttccagctactcaggaggctgaggtgagaggattgcttgagcctgagatattgaggctgcagtgagccataagtgtaccactgcactctagcctgggtgacagagtgagacactgtctcaaaagaaaaaaaaaagaaaccaaataaccaaatttaaaaatgggcaaaagatctgaacagacacatcaacaaagaagatacacagatgatggcaaagtgcataggaaaatatgttcaacatcatatgccatcaggggaaatgcaaattaagacaacaatgagatactaccacacacctataagaatggcccaaatccagaacattgacaacaccaaatgctgacaaggatgtggagcaacaggaactctcattcattgctgtgggaatgcaaaatggcacagctacttcagaagacggtttggcagtttcttgcaaaactaaaacatacccttaccatacaatccggcaatcacactctttggtatttacccaaatgaattgaaaatttatgttcacacaaaaacctgcatgcaaatgtttagagcagttttattcataatgccaaaacttgaaagcaactaagatgtccttcagtaggtgaatggataaactggaatgcatccagacaatgaaatatcattcagtgctaaaaagaaatgagctatctcaaccatgaaaagtcatggaggaagaatgcctgttactaattgaatctgaaaaggttacatgctaaatgattccaattctatgacattctggaaaaggcaaaactatggagacagcaaaaggattattggttgccaggggctggaaggggatggtggggataatggatgaataaacagaatatgggggagtttttagggcagtgataacattctatgtgattctacaatggtgattatgtgccat

SEQ ID NO: 481553 - DNA, 1000 bp, Homo Sapiens; identical to SEQ ID NO: 308390

SEQ ID NO: 481554 - DNA, 769 bp, Homo Sapiens
  misc_feature (46)..(46): n is a, c, g, or t
  misc_feature (81)..(81): n is a, c, g, or t
  misc_feature (677)..(677): n is a, c, g, or t
  misc_feature (733)..(733): n is a, c, g, or t
cctgtcgactacaaaaccataccacaacacgattatctatgtaagnaaagcttcataaaaggttccctcgcaaaaagtcangggcaattcgtggggacgtactctgcctgcaacagcaactaaggcgtcagaatcggtccgcggcgccgaacaccgcacaggcccctctccggacccctcaggccagtcctcagctgcggcctggaccagccacaaagcacccactttcctccggcccagagcccgaccgtactcactgtgagttgcagaggcgccccgtcgtggggaagggagcctgcaacggataaacagactcgaaggaaggtcggggagtaaaggcgatgaaagctgtactcggaccagccccctccggccactaacttctaaatctgcggaggcacaacaccggccagcacgcatcttgccccaaaggcacttccggaagctctctaggagtcctggaggtctacaagctctatggtcggccgactgagggtaccggagtaccacgcccctcacctgctgtgtgctgtgcctcgggttcctcccgcgtctgcgtgcctcaggcttgcgctgtcgctggggcagtgaacgtgctggggaataacggaccttggtgtcccctccaccttgtgtgcccatgcagctccgcgcgctcgctgtcaatagtaacggtncccctgggggtagatatcggacgtggggaggctggagctgtgaataggaggctggngaagtgttggaggagggagcacttcatggatctcga

SEQ ID NO: 481555 - DNA, 1000 bp, Homo Sapiens
aagcaagcagcaattcttctaatgacatgaagtttggaaagacacaaactgttttcaggatgtggagagagctcttgttatcacctaatatttggatagctggaagaatctttgattgcaacacaggcatttgatgcatttttaagtatttacaaggtatcccctaaaaccctaaacactttcagactcagcaaataaattctgaacagctggcgacattaagggtgattttattctattgaaatactaagaattttctaaaaggcaaaacctgaaggataacacaacaaagaccagatacttagtagctgtgcaattactatttgttaaaatataaacacattttttattcaacttgcttctttatgtcactgtctattaataccttacctggatcaaccaaagctttgttaaatatttctttaagtttccgactcttcacattccttccttgagcaagatttctatacatctcatagcctatgatcataacaccaccatcttcttgccacctctgcagcatgtagcttctctcctgaggacgtttcacagttgctaattcagaaaccttttgtggggaaataaagatttttttaagtagctactaaaaacatgtgaatattaaatattcccactgaaatatgcatcactggttaaaaaacattaaaaattaaaaaaaattaaaaatagtttactatatgaatttcatgtgactattttaataatagaaaacatttaaaataagttacctcaagcttctcatcatcttttaatccctcttgccacttctcaaattcattcatccaattcaaagcagtattaagaggacaaaccactaacgccgtgctgaaatccagtttgtcacacaaaagaactgtatgaagaaaacttaccacctataagaaaacagattgttcaccttcgtttaatattccacaaaaaaatttaataaattaagcaatcttacaatattatagctttgttttgcttaaacaataaa

SEQ ID NO: 481556 - DNA, 752 bp, Homo Sapiens
ccaatatatatggataaggacaaatagacattgcaaaaaaattttgatatggtagagttgtgagactgggtagttttgtttcttttgttgctaaaatgtttgtatggtatgtttaaatcagtatttttaaaattacgacacagaaatatttgtagctcacctttataaataaggggtttatctttatcttctgtcttctccctactagctaattcaagaaaatcttcaatcaagtccagagatatgagggactggctgaaaacaaggctaaaaaaacagattagtgtttatggattagagattcctagtaaagatatcacttcttcctaaatcgatctacaaatttaacacaattgtaacaaaaatcccagcaggattttattgtagaaattacaaggtgattgtaaaatgtatatgagaatgccacctcagaggagggaagacaattctgaaaaagaaaaacaaagttggagggctgactcttcatgatttcattacttacaaagttacagtaaccaagacagtgtagtaaagggacaggcacagatcaatagaacagaatagagtccagatagagagccacataggataattaattgtagggccaggcatttcaatggtaaaaggatagtcttttaccaatggtcttggtagcaggcgcagtggctcacgcctgtaatccagcattggagacgagacggtgatacaggtcaggagatcggacatcctggctaacacgggaatcgcctact

SEQ ID NO: 481557 - DNA, 1000 bp, Homo Sapiens
ttacttagggactcaaacttgaagaaggtgcctggtgtggtgagagggagggcaggtgtacccgcagctgacttttcccggggatcacttcccccaccatcctccattgccgtggcccttgtaagtctacatccagtagacactttgaccccaggggcatccgagtgtcttctatgtgcttaggcatctcaagcaagcatccaatcctaaaaagcctggattgctaagtctctttgttttcactgggcctcctattgtttccagtcaaaagcatataactacttcatgaatttatgcaaaagtaaatgcagtatcccctgcctagggcctagccatgcctgtttatctgcgctgcttctgagctgctgttcattggggccagtgcatctgccgccttgagctataaacctcccttgctcctggctcctccaatccacgttccctcctttatggctctgtccccggtgctttccctccctgcagcacctccttaggatggtcagccacagttcccgcacacactcacggatttcatatccagggcgtcactaccagcccgtagctgccctgcaccacctgagcagcaggctgtgggaaggcgcctaacccacccagtcaccacagctggtttctcaccgtggcccaggagcagcaggcttagctgagtccatccaccaccctaccacaccatgtgggccccacacctgccttctttcttgaggaatgactgattttctttaaaatttacatgagaaaagacacaggtttgcatagcacctccatggtcaacttctcctggtatatcctacacaaggtgaggggtttgaattcgcctggtaagctcatactgcactgcatataactcaaggttaagtgtggctttctctctgaaatgccctcccaaatggagcaccttcctaaatccctcgtgtcagtgttgcagctctgccacgccccactcttggaggtgtcctctgtgccacagcaggcccccagagcc

SEQ ID NO: 481558 - DNA, 1000 bp, Homo Sapiens; identical to SEQ ID NO: 308392

SEQ ID NO: 481559 - DNA, 1000 bp, Homo Sapiens; identical to SEQ ID NO: 308393

SEQ ID NO: 481560 - DNA, 1000 bp, Homo Sapiens
ggatcccctgtactagccttacaacttcctgtgaattttcatttcaaaataaaaggttacaatgtacagagaggatctatggaagccttggggaggcaggtgtcagctccatatgacagcctttctgacaaagctgtctgaaaatggaatggggtgctttaaagacagccctcactccctagaatcagacagccgaccatagccaccctcccaagctgacagtgtccttcagcagtgagggcccagctctggagccagattgcctgggttcaaatcccagctctaaaagttacttattcgactatcctggacaagttatttcatttctacaagtcttcatttctgcattaaaaaatggtagctaggtcaggcccagtggctcacgcctataataccaacaagtcggacgctgaagcaggatgatcacttgagcccaggagtttgagaccagcctgggcaacaaagtgagattccatctaaacaaaaaaaaaaatttttcaattagccgggtgtgatggcgtgcgcctgtagtcccagctacttgggaggctaaagtgggaggttcacttgaacgcaagaatttgaggttgcggtgagctgtggtcattccactgcactccagcctgggagggcaaggccttgtctcaaaaaaaaagaaaaagaaaaaaaaagtagataaaaccacatgagactttattggcaattgtgagttactctttccacatggcgacagcctgcaatgggggctccagtttggcttgctggtctcttctgggcagcgggcactgctgtctctactttccaggatggcagttggcccgaggggctctaacctgccattggaacctcacccatagcccagaagcctcattcacaacccttcccagactccactccaacttagagaacctgaaaaatggacatgtggacatgtatctgaaagaaagtctaggcggttgcgcttagacaagggcctacggctttattaacagatgtcgag

SEQ ID NO: 481561 - DNA, 1000 bp, Homo Sapiens
ctcaggtttcccacaggctggtggaagagaaagacagagaagagcacctagcacagtgagaacgtggagaaggggcatggaggccggggcgggggcagggaaacactgattctcaccagaagcctctgagggaggcgttagtgccccacggagcaggtgaagaaatggaaactcaagggttaaatgaattcatcatgttgtatagtgagtcatttccagggctaggattcacttgtggtctgtgcttttcaattctgccattaaaatggaaatggattttatgcagtagggatttccttctgcttctctcacacttggctgcctgtttttggccttgtaaccttcttctgttcaatcaggactgaggcaaaagcaaccactgatatgtgctgaggcaactcacagcgatacttcccagtaagcaggccaccctcctttcctgcaaacctctgcctgaaagcagatttcatccatcctggccctcccaggtccaccctggggccttcctccactgaccagaaagcacagtcagatgcacagggtcgctgaggctggtctggccagtctggcacgtgtactccccgctgtcattgttgttggccttgaacctgtagctgggctgcgtgtgggtgggaatgagattcccattgtggaaccacggaatggagtcgctctcagggctgtgagtcccccggcatgtcagagtcacagagtcctcttggagcacgttgatccactagggctcgagtttcagcacagcctttgggggagctgctgaggggcagagagaggaggtagcgtgaggaagaggaagcccaagagcctgagaggccctgaatctcagacaaaaaagcacctgtaggcctactgggggcaccaaaagctgagccaggcccagaatggttctgcaactgaaggcagttgcttttgctcatacatcccaccacaagggccccagggaacccaggactcagacagggcaacagggaagaaggaggga

SEQ ID NO: 481562 - DNA, 1000 bp, Homo Sapiens; identical to SEQ ID NO: 308394

SEQ ID NO: 481563 - DNA, 1000 bp, Homo Sapiens; identical to SEQ ID NO: 308395
  misc_feature (709)..(709): n is a, c, g, or t

SEQ ID NO: 481564 - DNA, 1000 bp, Homo Sapiens; identical to SEQ ID NO: 119941

SEQ ID NO: 481565 - DNA, 1000 bp, Homo Sapiens; identical to SEQ ID NO: 308397
  misc_feature (2)..(2): n is a, c, g, or t

SEQ ID NO: 481566 - DNA, 1000 bp, Homo Sapiens; identical to SEQ ID NO: 119942

SEQ ID NO: 481567 - DNA, 1000 bp, Homo Sapiens; identical to SEQ ID NO: 119943

SEQ ID NO: 481568 - DNA, 1000 bp, Homo Sapiens; identical to SEQ ID NO: 308400

SEQ ID NO: 481569 - DNA, 1000 bp, Homo Sapiens; identical to SEQ ID NO: 308401

SEQ ID NO: 481570 - DNA, 1000 bp, Homo Sapiens; identical to SEQ ID NO: 308402

SEQ ID NO: 481571 - DNA, 1000 bp, Homo Sapiens; identical to SEQ ID NO: 308403
  misc_feature (3)..(47): n is a, c, g, or t
  misc_feature (281)..(281): n is a, c, g, or t
  misc_feature (334)..(334): n is a, c, g, or t
  misc_feature (794)..(794): n is a, c, g, or t
  misc_feature (839)..(839): n is a, c, g, or t

SEQ ID NO: 481572 - DNA, 1000 bp, Homo Sapiens; identical to SEQ ID NO: 308404

SEQ ID NO: 481573 - DNA, 1000 bp, Homo Sapiens; identical to SEQ ID NO: 119944

SEQ ID NO: 481574 - DNA, 1000 bp, Homo Sapiens; identical to SEQ ID NO: 308406

SEQ ID NO: 481575 - DNA, 1000 bp, Homo Sapiens; identical to SEQ ID NO: 308407

SEQ ID NO: 481576 - DNA, 1000 bp, Homo Sapiens; identical to SEQ ID NO: 119945

SEQ ID NO: 481577 - DNA, 1000 bp, Homo Sapiens; identical to SEQ ID NO: 308410

SEQ ID NO: 481578 - DNA, 1000 bp, Homo Sapiens; identical to SEQ ID NO: 308411

SEQ ID NO: 481579 - DNA, 1000 bp, Homo Sapiens; identical to SEQ ID NO: 308412

SEQ ID NO: 481580 - DNA, 1000 bp, Homo Sapiens; identical to SEQ ID NO: 308413

SEQ ID NO: 481581 - DNA, 1000 bp, Homo Sapiens; identical to SEQ ID NO: 308414

SEQ ID NO: 481582 - DNA, 1000 bp, Homo Sapiens
ggcatctacaagtacaactcggaccgcaagcgcttcacccagatccccgccaagaccatgtccatgagcgtcgatgccttcaccatccagggacacctctggcagggcaagaaacccaccactcccaagaagggcggcggcacccccaaatagccccacccgggcggtccacgggccgggccctgtgtgctgcggccgccatcccctggaggacagtcagtcggtattcctgggtcctgtctgtccccaaccgtgtctgggtggggctggagtctccaccctctgactttgagtccagtcctgctgtgggggctgagctgggaggttcagggactcagggctcagctcagtccccttgtctgtcctcccccacttcttgaataaaataatttaaagagaagttgaaccttgtccccccctccgaggctggccggggtcccacactccctggctgtgtttttagtctcctgttctttctcaaaccaactcctgtcttcaacccccataatcccctaatgcagcttcagccagggcactcccagcccccagccagggctgtttcgaagctgcctctgaactgatctctcaggctcgaggtgtcccactggcccttcctgtggccttggccacccccgcttgctggattctcctggtctgtgtggctgttgttactggccctaaccagcgtttggcatggggccaacttctaacttgatcttgtctcccctggccagcctggtgtttccaggcctggcatctacctctgggccagtgattccaggtttctctgagatctgtgtttgacaatccagttgccccctgccattgcctgggtgtctctctcagatgcaaggcctgccctgcaacccaggctggcactggcttcccagctgccgcccagttctacacagctcagccctcccctcctgtctcactcgcttctctccagccctgtcacctccctgcaaagtccaagccaatggcctgggcctccccatgt

SEQ ID NO: 481583 - DNA, 228 bp, Homo Sapiens
  misc_feature (102)..(102): n is a, c, g, or t
  misc_feature (131)..(131): n is a, c, g, or t
atttgtgaaccaaagtaatgcttttctttatcagattttagaccattttgaaacttaatttttcacttaatgattgaaagaaaatgtgcttttattttcaanacaatcccacactgaattcagtggaaacntcattcatttgtttacctgggcatgccactgaactctggggaaggactttttttagtccaactttcataaagagatttgccttcaaagccttcatca

SEQ ID NO: 481584 - DNA, 1000 bp, Homo Sapiens; identical to SEQ ID NO: 308416

SEQ ID NO: 481585 - DNA, 1000 bp, Homo Sapiens
caaagccccctccctcccacgggccctgagctgcccacatctgcaggactggctgctccagacagctcggagcagcagcgcgtgccccctccaccccgaggaactaaagccagtccccagcaccacagagcagggcctgggagcagctggggagccggtgccaccttgcccctccctggccctgctgggggcttaacccttccctctgtcctgagccgacagcctggattgccgacaggccgcgagcgtggccttgggcccagggtgtcccggactcagcactgacgttcccggaaagagcccacgttgagtaggagctgagacctgcaggacacaggaactcctcccagggtcctggatccagctgctgctcacggcaggaggcccgaaaccagaaggcctgagcacttgccccgtccccaagagatgcacagaggctggaaggggcagtgcaggggctgaccaacctgctcatgaaaggagggtccagctgggcttcctgggtcgagtaggggttcagaaagctgtgaaacactcatttcctgcatcaggacttacttcggtcctggatgaagagtactgaagatacatgcctaaaatattcctaacaccaggatttgtgcatgtgtttccttccccaagaaagctataaacagcaaaaattctgctgtaagcttccctgtgtcctctctccctctcttccttccccctcccctaaaactaaaaggaatgttaaaagaccctttttctgtgaccagcggaccttatctatgctcccaattccaattccttgtgaacatactttgtaaagtcctgtaaaatcctgtctcttttgccatgctgctgcaaggtcataaagtagataaaattagataaaacctaagttgcaattctgtttttcctcaaaatctaagacatgtcacaaaataatttactgcctttgtttctctctctggtaacatcttcccaccacatgtatttcccgccttaaagagattaa

SEQ ID NO: 481586 - DNA, 1000 bp, Homo Sapiens; identical to SEQ ID NO: 308417

SEQ ID NO: 481587 - DNA, 1000 bp, Homo Sapiens
gatccaaccacctaccactagaccccaactccagcactgggaattacatttcaacataagatttggatagggacacagatccaaaccatatcactatttctatttcatacatttgtgtcattagtgtatcgattatttttgtttgttttagaaatatgtaaacatgttggataactatatagagccttttgcaaccagttttattcactcattacgttaccataattcgtccacatttttggttacagttgtaacttttattaattttcattgttaggtaatatttcattgtgtgaacactattttttttctattctactgtagaaagacttgaataatcatttcatttctgggaatttcagtgtttattaaaaatatactgacagtaatttatttttaaatatataaatgggcacattacagagcgtctccttttttcttcatgtatctcaaactctatatttttctatatccttgactttctgtactacaattttcagctaactaatattatttctttggttgtgtctttataaaatatttggttactttcaaacttgtcatgtgagatcatcttagtgttggaacccattttttttttactatgcatatggattattttacattctgatatctccatatggacagccaaactgtctcagtttcagttgaaatttggggctcttggtatcagtgtctgcccttgaagcaatctgacctttctagtgtgcaaacactgccctggtttcagctcacacttcacttttcaaaagttcctcagcatcataatgggaagattttctttacttattgtaggtccagtaatctacttgaagtgatctttctactaagatctaatcacctttttcaaaatttatttattctagcagataattcttcagaatttttaatccaccatgccagaccagcttggttagggagaccctaacccagcggcactagaggaattaaagacacacacacagaaatatagaggtgt

SEQ ID NO: 481588 - DNA, 1000 bp, Homo Sapiens
gatcataacaaacttcagttaatggataggataaacccacttctcccagaacaactggaaaaatccaaataaatcataaagattatattgttaaagactccagagtgttgtagaaacaatgaccacaggataagttgaaatttcatggaggaggacctttaagataagctgactgccactggacttctttatttttatcctgaggtttgcttttgatatatgggaggctcaataaatgatagccattaggatgatgatggggaggaaggggaggaggagaataatggtgattaactgtttcataacacgtaatatttgtttctggaaaggtatatttctctggttgttagctcatttgcagaaccattttgacagatatactgaggccaatgaataattacctccttctatcatacaatgtcatctccacccagatctcagtttgtttttgatacatctcatgcaaaagaatgctcatcctagactttctcactatgtttttggcaataatgcatatgatagctccaataacattactagactgtatttaccattaataaagaggttgtcccttcaaaacttatttcaattcttcattatacaaacaacataagcaagattttcctttcttcttaattccctccttactattaaaattatttcaaaagctgtcataaattgttcccttgtaagtatacaaagacagctgttaacagtatgttctctcatgtgtacaaattctcatgtttaagtactcttatgaaaatcctcaaggtacagtacaaaaaggaagtttttaaatgtgattttcgctaaaggcaaattgcattgaaacttattggctttttactacactagagcattttctctttgaaatttgccactaaaagctttacaatattttgccaggtatagtttttaattgtcttaaataagtgctgaatcctttctccttagggaggagtggttggcaacagaaacaagataattattcctcaat

SEQ ID NO: 481589 - DNA, 1000 bp, Homo Sapiens; identical to SEQ ID NO: 308419

SEQ ID NO: 481590 - DNA, 1000 bp, Homo Sapiens
gatcctaaacacctttccattcccctctttctattgcctcagcacagatattaacgtggtgaaccatatgcacttcattcaatgtagtgtggaggagaggggaaaagtgaatataaatggaaaggaaggctctaaaacagcacatctatgattctttggctttgatttaagtggttggtacaaaagccacagttatttaaaaaaaaaaagaaaaataattttgtccaaaatttgagttgttaaaggttttcacagactgagtaaaaaacccttttctgaagaaaaaaaattacagtgtaaattttgagaagggaaattgggaagcaggcagttgtatctggttctggggctacctcctaagagtgttggatatgtacactgcagaagggcaccacatttaggaatgtgccatttgtatcttaaatacttattaacacatatgagcatgtgggtttccaggctatgtccatgttagaagaaatgtcttccacataagcctgcacttgcatagatggttgtgtgcaaaaaccatgttctgggcctctactgaagttacttccttcacctagctgatgctctcaaatactctataatttccattctccacccttctcaccccaaacataattgaccctgacataattgtctggttttgtcaccttgggccaggtctagcagtaatctcagacttgcatgctgtgtgctggatctattgtaccaaaggggagtgtgagccagtgagagttactacaaagccctcaaatacatccatttactctccaaatatatctgtgtaagcattggtaacagtatgagttaatgattccaaccctgtcaaatgtgtggaagactaactataaataaataactcagaatggtttccttccattgttccaaataatttgatatagtctattcagtaaatgaataaaacaggccaataacttggcttcatcaaaatgtcagagttgaaaccctggaattattttaaagttttctc

SEQ ID NO: 481591 - DNA, 1000 bp, Homo Sapiens; identical to SEQ ID NO: 308420

SEQ ID NO: 481592 - DNA, 1000 bp, Homo Sapiens; identical to SEQ ID NO: 308421

SEQ ID NO: 481593 - DNA, 1000 bp, Homo Sapiens
ttttttttttctttgaaaatagacatctttatttaactataaatctaggctaataaattactaaataaaataatcatgaatgtaatacttttccgtattaaataatttaaaatttctacaacaggcactgtggttcatgcctgtaatcccagagcattgggaggccaaggtgggaggattgcttgaggccaggagttgaagactagcctgagcaacataggaagacccaatctctacctaaaaataaaacaatgtgccgggcatggtggcatgcgcttgtagtcccagctatttctagaggctgagtctagaggatcacttgagcccaggagctggagattacagtgagtgaagactatgccacttcactccagtatggttgacaggatgagaaaatgtaaaaaaccataaaaataaaaaaaattaatacaattcttggtcagtgcatcgaaaggatccctgaggtctgaagtccagcatgcactggaagaataagcgatactgtttggaagaataaggtcatgcttcagagaagtgtctgcttttccacaatcaaaaaagtagaaagaaaatgcttttttgctgggatttcttgttcagttaaaacttgtgcaggtgttccatccattagcaccgagagaaagtggcagaaggtgttaagaaaaatggctgctgggatcatgagcgaaggtaatgagtggcctgagatgttgagccgacaatgtcctcatcatctgctgggggcctctgggcttgctaaggcttgaactcctgctttccagaaaggcacagtggtgagtagacaggcggcctccctgaagggagagcaggacccagaccaggctaacagaggcttcttgatatcaccttccacctgtcactctaaagaactctcctcagatgccagggaggataaagcagaggatgatgaggaggctccagggactgagggtgctggccatggctttgggttgggttgtgcctggggtcagagagggtg

SEQ ID NO: 481594 - DNA, 1000 bp, Homo Sapiens
ccaacagctctgtttacagtcacctcaaagaacccaggtccaaccacctgatgcacagcgggttcccctattcttctcattactgcgcccagtttttggttttgccttgtagaatataccagtctattattcaccagtttgtctctgcttctagaatgtaagctgtatgaggatgagggtgtcttagtcacagctttatcccaagcctagcatgatgcctggcacataacaggcattccattagtattttgagagatcatctaagtttggcatcctaatttcacatgaggaaagaaactcaactaagggcccatcattttcctgcttactcagattgttgcactgagggcaatgtagtagttaaaggcacatattctggtaccagacttctttggttcaaatcccagctcctccaatgactagttgtgatgctggggaaattaccaccctttgtctgtttcctcacaggtaaatggggattatagtgtctatatctaataggattgttacaaagattaagtgaattaatagaaagatgatacctggcatatgataattctgctcttcattattatgtaaactcaaaaagtttcttcaaacccccaaccccttactgtgcttagaacacaagaaacaatgttctttgaatgatataagtaataatttcccacaacttttaccactcaagacagaacctatgtctggcctatacaactagactttctcagatacttcgaggagaatcaagatccgatcctcgtggcaaaacaaacaaacaaaacgaacaagtccttcatgagtggacatcaattttggtcatgctgatcttttggagagcatagaggattcacctgctaaaacagagaatgctattttctctgtcaaaagataacaaataacaacatactactttattacctgcattgcccccaacaagagatttttgtagcaatacattaaggtagcaataataatttttaaaatcttaaaataatcagtg

SEQ ID NO: 481595 - DNA, 771 bp, Homo Sapiens
tgagttacgcaacatttcttttattgcctcgggttggaagctccagcgccccctcccttagccctacgtcccccccaccccgcccccgccccgcatgctctgactcctttggggtctgaagttcactgccccgcacctgcgccccagccccgcccagcgcttctgccgtggttccctggtgccgcctcccgcttgccgaagcgcaggccgaaggagttccagttgtagttcggcaggtccttctcccgctgcaccagcaccgcgccctggggtgcggggatctggcggctgtggggggcggacaggcccggctgctggcggctcccggagctctcggggggcggggacagcgaggtcccccgacggctcagcctggcagtagcagctggcttcctctcggtgcacggcaggctctgctccccgggggccaggaggcccagggattctagctgctggcctgtgggtctagaattccccacagaggccaccttttctaatggctccccaaagtgggtggcacagaggaaaagcagtagctgccaagaaaccagtgagttcatcttggtgagaagagccaggtcctagaagtgccttgaggcttgcctcagtcctggcctgggcaggagtctgcggagcctctgaggtgacgagaccacctggctgggtgaatgtccagagggtgggcagcctcgtgccgaattcggcacgaggagagagagagagagagagagagagagagagagagagagagagagagagagagagagagag

SEQ ID NO: 481596 - DNA, 1000 bp, Homo Sapiens
tctttcttcttcatactaggggaaataggaatggctgctgaggagagatgggtaaaatgggagaaataaacaactaagattctattacagaaacctaggatttatggttccttgtggaattggaataatctcaatatgtatctctgtggtgagctgaaaaatgtaccctctcctcccaaaaaggcaaaaaaattcacatcgtaatccctaaaactttacctgtcaaaaaaggatcttcacacacatgatgaagaattttgagatggggagattattctgttttatgcagatcagccctaaatacaatcacctgtatccttgtaaaaggcagaggaagattacacacacacacacacacacacacacacacacacaaacacgagacagattgagagagacagagacagtgtatctgggcagaatgtgaatactcaggccacaagccaatgaatacccaaagccaccagaagttagaagaggtaagaaacaaaatctcccctaggacctccaaaggatatacgggcctgttgatacctgtatatcagccgagtaatactcatttcagacttctgcccttcagaactatgagagagtaaatttctgttgtgttacaccactaggtttgtgataatttgttgtagcagtcacatgaagccaacacagtcccttctgggaatatggcataatcctcatttcacaactcctccctgcctttggctggggtagaaaaaaagtctcttcttcaactgaaaaatcctctttccatcttatttcatttgaaaaataggaaaaagtagatagtttgtgaagtcattacctcaaagcccaatcattctggaaccatgttttctatccatccattgaaattatctttaacaaacaagctaatgactgcctaataacaaatcttaaagagcatttgatttttaaatgtttacctttactttgctgaatttgagaagatttatcctttcttccatcttaaaactctgtctttacc

SEQ ID NO: 481597 - DNA, 1000 bp, Homo Sapiens; identical to SEQ ID NO: 308422

SEQ ID NO: 481598 - DNA, 1000 bp, Homo Sapiens; identical to SEQ ID NO: 308423

SEQ ID NO: 481599 - DNA, 1000 bp, Homo Sapiens
ttctaaaacaattacagaattgataccacgaagtaactaggagattatgacaagaacaaaagcttacacacctatattaatcttgaagataaatgaactaaatatccccacttaaaagatacagattggcagtatggcagtatggataaaaaagtaggatccaattacatgctgcctgcaagaaaccaacttaactggtaaagacagttacagactcatgctaaaagagtggaaaaatatcttccatgcaaatgaaaaacaaaagaaagcaggagtagttgcatttatataaaacatcctagaggaaaacttgagcaataccattcaggacataagcatgggcaaagacttcatgtgtaaaacatcaaaagcaatgacaacaaaggccataacagaaaaatgggatgtaatgaaactaaatagcttctgcacagcaaaagaaactatcatcagagtgaacagcctacagaatgggagaaaatttttgcaatctatccatctgacaaagggctaatatccagaatctacaaagaatttaaacaaatttacaagaaaaaaacaaacagccccatcaaaaagtgggcaaaggatatgaacagacacttctcaaaagtagattatgcagccaacaaacatgaaaaaatgcttatcatcactggtcattagataaatgcaaatcaaaaccacaatgagataccatctcatgccagttagaatggcaatcattaaaaagtcaggaaacagatgctggagaggatgtggagaaatagggatgcttttacactcacactgttggtggaagtgtaaattagttcaaccattgtggaagacagtgtggcgattcctcaagcatccagagctagaaataccatttgacccagcaatcccattactgggtatatacccaaaggattataaatcattctactataaagacacatgcacacatatgcttattgtggcactattcacaatagcaaagacttggaaacaatccaaa

SEQ ID NO: 481600 - DNA, 1000 bp, Homo Sapiens; identical to SEQ ID NO: 308424

SEQ ID NO: 481601 - DNA, 1000 bp, Homo Sapiens; identical to SEQ ID NO: 308425

SEQ ID NO: 481602 - DNA, 1000 bp, Homo Sapiens
tctgtggtatttgaagttgctagtttctcagtatcagcgcgaggctcgaaggtgaagggactgtggaggggctcctggaatcgctcctgcgaccttcttattctacaggtccagataccaagacccagcccagggcctgggaagcctgcaacgccaggactgcacagacacgaaccccatcccctctcccgctgggggaggacgagccaggtcaagttaggtcaatgtccacattgagaagagggtggccagcatgtcccagggtgcggagagacgctccactgcgtaggattctgggtcccgtgttgatacggggtggttcccctcctgcggtggagttagtgtctctcggggggtagggagctgaggaaactgctctatgccccagcccacccccaagggactcgccactcccactgccgtggaacaccaagcaccgggggcccgtccccagcgccacggcagcacgagctgcaggaggcaagggctgtggagacgggtggaggcggccggtgtactctcccagctccttttcgggtagacctgtcttctctcagcgccaactccaaagatcccaaaaagggtggccgagcccaggggcagctcctagagtcatcagcagctccccttcggggacttcttgacgccgggcaggagcctcgcggaagccgacgcgcgcttctggtgtcgccatttggcccggcggttcttgaaccagacctggggatggggggaatgctcagccctagccccaggtcctgcgtcccaccggctcccgagggtcccacagggaccgagaggggagcttcgcaacagggatgtgggcggacggcgctgtagagccgacacccgggccgcggctgcgcgccacctgcccttattcgctgcggacagactcggtgggtctggacgcgagatgggaacccccttagtacccgccccagcctccagctggcggcgaccaggacgccccttcttgggttgcgggctcttctgaatt

SEQ ID NO: 481603 - DNA, 1000 bp, Homo Sapiens
cttaaaagcctgtagggaaatatcctaaagcaggggtccccaagccccaggatgctgaccagtaccagtctgtggcctattaggagccaggctgcacagcaggaggtaggcagcaggcaacctggcgagcattactgcctgagtgccacctcctgtcagatcagcagcagcattagatcttcagaggagtgtgaactctattgtgagctgtgcatgcaagggatctagattgcatgctccttatgagaatctaactaatgccttatgatctgagtggaacaatttcagcctaaaaccatccccctgccgtggtccatggaaaaattgtcttccactaaaccagtcccagtccctggtgccagaaaggttggggaccgctatcctaaagtattcctcatggaagcctacttataaaggctatgctaggatttccagttgcttctaaggaatgcaaatcagacactactgatttgaacctctttcttcctaattcagtgctacaaagggtccagtgtgaaccaagcagggcagccacagcatcagtctaacgtagggctggacggcttggctcaattgcctaggtcagtcttccaaggttcaactcagcaagcatgagcactaatactcaaagtggctgctgcttaacatgctcctgtatatactaccataattatctgagctattgcaaggccagcacaaggactaaatacctagaatgcaagaatacagtcaaaggccaactcatgttttaaatgacacttagataatatttcactctgcattatacatgtgggagttgtatttctaaaattttctcattaatatgaaaaacagagtaatgaaaaacagagtaacttattgctcctttttgagattgcccagtaagtacaatagtatttaaaagtgttggaaggcaaggaaactaacactttagccacaccagtatgggttgtaagacttgactcctgaaaaactcacctaatcaaagtctaagctggta

SEQ ID NO: 481604 - DNA, 1000 bp, Homo Sapiens
cgggaggcagagtttagttagctgagactgtgccattgcactccggcctgagcaacagagtgagactccgtctcaacagaaaaaaacaaaacaaaacaaaacaacaacaacaacaacaacaaaaaacccttccctgtggctagtataaatgttatccctagttttctcaataaccctgtgaggtagctatcagtggctcttttttttttttttttttttttgagatagagtctcactctgtcaccaaggctggagtggagtagcgcaatctcggctcaccgcaacctccagcttccgggttcaagtgattctcctgcctcagcctccctagtagctaggattacaggcacgtgccaccatgcccagctaatttttgtatttttagtagagacggggtttcaccatgttggccaggatggtctcgatctcctgacctcatgatccacccaccttggcctcccaaagtgctggggttacaggtgtgagccaccatgcctggcctgctccattttagagatggggaaactgagtctcaggccaggtgcaactcggaggtccacgctcttttgctgtgtggtgtctgctctgtcttcactctggttcctcagtgcctgtgcttacatatgagttatctggctggtagctccgatttggctcagaatcacatctgatcacattaatgagccctgacactccctgacctccctgctaggcattcctgatcacgttgttttcttcgtagcctttaccactgctggaaatcatctcttatttgtttaccaatttaatatcccccttccaactagaatttaaactcttagagagcagggatggcgtctgccttgtatccccagcacccggagccgtgccttgtatactggagatgctcagtaaacagccgtggatggaatgaatcttgaagcagcactgttagaccctcccagctccaagcatccctcctgcatgctccctcggtgctcttaagctggagaagctgttg

SEQ ID NO: 481605 - DNA, 1000 bp, Homo Sapiens; identical to SEQ ID NO: 308429

SEQ ID NO: 481606 - DNA, 1000 bp, Homo Sapiens
gtaacaaacctgcacttgtacccctgaacttaaaagaaaaaaatggggctgtgactggtagctacaaactcaaggattggtgggaaatgtctttcttgctttcactcctgtgcctagaattgggcctggcctctgtacaggaagtgctcagcaatgtctatgaaataaaggtgtgaaattatccatgggagtggcacttggcttgctcagtaggcagctcagtgaaatgctgatttggctttggcacctggggtttactggggcttgacatgcccttgtgatcaaattcatgcacaggtaactttctcatcatctcttcctgtttcttcacttgtcaagggcttttcctgacagttaatctactgggggagttgaggaggcaggctcgtgggcaaaggcctatgggtgagatatgggtgggtgggctctgccctggctgagtgccagtgtcacagcccactctccctcccctgcagggagcagcacatcgcagagtgcatggccaagatgccacagatgattgtgaactggcagcagcagcagcgggagaactgggagaaggcccaggctgacaaggagaggagggcccgactgcaggctgaggcccaggagctcctgggctaccaggtggacccaaggagtgcccgcttccaggagctgctccaggacctagagaagaaggagcgcaagcgcctcaaggaggaaaaacagaaacggaagaaggaggcgcgagctgctgcattggctgcagctgtggctcaagacccagcagcctctggggcacccagctcctgaggctttgtcccttcccaataaagcctgctacctggcagtacccctgaagagatctgcgtcctctcaaggtgtgcctctctgggtcccctggttcctcccccaatacttaagagctggggaatcccccacttggctgtactcaaaaggggacagggactctaggccctgctgactaactggggcttcagtgggaggaaaagggggg

SEQ ID NO: 481607 - DNA, 1000 bp, Homo Sapiens; identical to SEQ ID NO: 308430
  misc_feature (803)..(803): n is a, c, g, or t

SEQ ID NO: 481608 - DNA, 313 bp, Homo Sapiens
gtagcattacagacttctactgatcagcacgggagttttgacctgctccgtttccgacctgggccggttcacccctccttaggcaacctggtggtcccccgctcccgggaggtcaccatattgatgccgaacttagtgcggacacccgatcggcatagcgcactacagcccagaactcctggactcaagcgatcctccagcctcagcctcccgagtagctgggaccacaggcacgcgccaccgcgcccggcgcattacagacttctgactctgagagaacatacagatttttgttttcaagctctggaagtga

SEQ ID NO: 481609 - DNA, 345 bp, Homo Sapiens
gtacaagtattttattcattttttttagagacaggatcttgctatgttgctcaggctggagtgcagtgtctattctcagtagagatcccattactgatcggcacaggagttttgacctgctttgtttctgatctgggctggttcacccctccttaggcaatctggtggtccccccatctcgggaggtcgccatattgatgccaaacagtgcggacacccgactggcgtagggcactacagcctagaactcctaggctcaagcaatacacctgctttagcctcttgggtagctgggacatggcatgtgcagatgcaagtattttagaaaaccattgggtagtacct

SEQ ID NO: 481610 - DNA, 284 bp, Homo Sapiens
ttagtcttgagtgtgcaaaggatcagcacgggagttttgacctgctccgtttgcgacctgggtcggttcacccctccttaggcaacctggcggtccccgctccagggaggtcaccctcttgatgctgaatttacagcggacacctgatgggcacagtgcactgcagcccagagctcctgagctcaagccatcctcctgcctcagcctccaagtagccaggaccacaggcacccaccctgaggtatgccatttctctttggttcttgttatggtagttcctctgt

SEQ ID NO: 481611 - DNA, 1000 bp, Homo Sapiens; identical to SEQ ID NO: 308433

SEQ ID NO: 481612 - DNA, 1000 bp, Homo Sapiens
gtacaggtctaaaccatgccaatggcagaaaaaggggggacagagagatataaacagtgtaaacgaaatcatacaaatgatagaggctggtgacctccataaacaggcaaaaggagatgagcatatcacctaagtttccaacatgaatagatggaattattcgctgagaaagacataaagaaccagcaggtttgggagtaatcagaaacctccaagtggcatggcaggccatgtgaataaacaggttgcaagctcagcagagaggtctcgactaaatacactgaaaaccacagggggaagagatgaagccacaaagatgcttacccaggaaaaatatccagtaagaaaagcaatacaatcctgcaggagctaaagagagtcttgagatttggtaagccccaaacaacttttacatctcaacaaatcaaaatctgaaagcagaatatattgcccactatttactaatattatttagtaagagaggaaaggtcatcctcaagtaggattctccactagaagggtaggaaaacatacccctatctccagagaagaggtgttacatgaaaaccatattcagtgtacctgattttctaactagagaaaacaaaggtctacaaaaatcaaactagacagatggggaacctattggggtggggcaggggaaaggaccaccacttgcaaaaccacctgatacttttgaggtccacaagagccagaagctggcggggccctatcacagcgaacaccccatacttattaaccaaacaactgattaaaacttgctttgtctcctgaaagatcgttctaatctgccaacctgagcattctgttctacttaatacctgttgcctctcactgaaaattaataggcattctggtaatataccagtctctgagagcatacttaatgagtccatcccacaaagaggtcaattgtcaaatgacagattctctttcagtatctccaaggcacagatgccaaacctagagaacttctgct

SEQ ID NO: 481613 - DNA, 1000 bp, Homo Sapiens
gccgccatggatgggccaaggtggtgggggtgggagagtgggagtgagggaggggtcccctccctgctggctgcctagttcccaccctgccttaggacagcagccccagctgaggccctcagctccccagggtggcagaaggagggcatgacctggggacctggggacaagcagcaagtcctcagcaggccactcggacctcatcttccgtgtgatctgggggtggcggcaggactctgggggtgggcaggtgtgggaagctgtgcactggcccagctccgtcctggccccccaggcaccctctcagcccccactcctcttctgggagcccatctcccctctcctggccaggtcccatgacaccatcacccccatagtgtcatctgggctgagcccctggggtacacccctccggccctcccagctccccagaacaggcacctggaggtccagcctgacccatggtgagggggcatgggctccgagccctgctgcctgcagcccctacctgcctcttagcaccaggggcaggatcaggaggtcccagaagcaggaggatgagaccatgggggcaggcaggttggagtatcctgtgccccggcccctcgcatccctatgtcccaccctggcctcagcctcggaacctctcggggccgctctgcacacacccagcctttggctctcctgccccgagcgggtttggtagtgggcaccagctatctgcaggacccctcccttccgccctttccaccctgagccatgccacagcaggacatgcggtggctgccccaggacgccacagtgctctgaggcccggcagctggagaggacatgggtgcctccttgagaggagtgtgtagggagggaggctggatggggggagcccaggtaggagggcagagccaggcgctggcagggccggggggaggcaaggcaggcacttccccagggcttcctgggggctcacagcccttcagagacacccccagctgcaacctca

SEQ ID NO: 481614 - DNA, 1000 bp, Homo Sapiens; identical to SEQ ID NO: 308434

SEQ ID NO: 481615 - DNA, 1000 bp, Homo Sapiens
ccaaaactttgtcaagaatggaatgcttgactctcaaaaaaagcaatttgagtttactataaagtaagtgtttttttttttccataaaaggaagaaaaactttttattttattttattttattttggtgggactctgttataaatctttattttttagtacttgaacactggcagaactaaatacaaaagcaataaaaaatcataatattttctaaaaatagttttccatttggggcttgcggcccccttcaataaaatcattctgaagatttaaaggggtttcagcttcaaatttctcagaataaagactccttttgagcggggctacagaagcccccatgaacttcctgctccttaaaactaatgggcaaaacaaaaacaaaacaaaaaaacctcctagaaagcaaatatgacccttctcaatacagagctttccccactccaatttgtaggttttcagagaagactggggaagtaggtaacagcgagcaagtcatcctgtgaggaaggtcctggagcgagccctagagtggggactccccaggagggcccggagcagcggggacttctcactccacctcttcagtctctgattagcacacattcgggggagtgcttccacttggaaaagcttccaggaggcagctcttcagtagcgaccgaggcacacgtggtccatggacaattttatcctgtgaagcggatacggtttctcacaaaggttggccagcacgtacaaatgtctcaacgcatactcgcacgtgggggagtgccagttgaagcagtgggtctggaagtgcagcagggcctccaggtagcagctatgccccgtgaacggggctctctcagacaggagctgctccacctcagcctcggacgctgccagcaaggaggcgatcttgcgcactgacttctcaatgaggtgcctggcatccagatgccgctggatctcctctgtgagctgcctggagtcctccagatcgttggtgttcatcagtt

SEQ ID NO: 481616 - DNA, 1000 bp, Homo Sapiens
aatgaacagaatatttttagaaattttaatcagctttattgggtataaacacatttaaaaaaccataaaattcatgtttttttttttttttttttttttggaatgagaaaacatttattccatctccaaacagcatcccagggcggggcatctcccctaaggctttataatacattcagcacagacagagtctgggagccatggggcacccctgccctcctcacgcttcttaagtaacaactgcataatatttacataaagctgggtgttgtcaggcaaagctcttccctgctgccaggagtgggagcaaggaggaagtgttgtgggcaccggccccacccccacaccatgggaggcagcccagagaccactggcacagggtggtggcccccagatcatacagcagtggggatagggggagcaaacctgagtgaggacgcaggagcctggtcccgccccactgcacagggcaggtgtgagggctcccccgagtctttggcagagaacgcagataacagcgactcccacagcctgacctgggctggggggaagctgaggcacttgtcagtagcacatgggtgcctgctggcttctagccactccaggaggggccggggtcattaaaagcaaggagaaacactagctaaaaaccctttcctaaaagtgtcatggaagagtgagtggctgactgaagccatctgtgtgcgggcacttggggtgtggctctgccagaccccgaggctgggaggctccttagctgtgtgtcaatcgcacaggacgtgacaggcgaaggaggggggctggcagttccaggaggctcgtgggaaagtccagggcagaggggagggtcctctctgccccccttcccaccccaaacggcactcagccactcagtacacagggggcggctggtagccctcagtggtctccgcattctgggtgaagggcagatgctggtagttgtccacagatgcacctgggtaggaggcgtaggcagtgt

SEQ ID NO: 481617 - DNA, 1000 bp, Homo Sapiens; identical to SEQ ID NO: 308436

SEQ ID NO: 481618 - DNA, 1000 bp, Homo Sapiens
tgtccaggctgcgacacccaccagctccccactctataactgagggccacattccctacaaaacatcccccaccagcccacccaacaaacacacatacagtgtgattaaagtaaaattcaatgcatgtaaatatctccatcagggaatcatacagagaagacccaaggggccattaggaacagactagggtgttcgttttttaaacagaggcataaataattttacccatggcagttaaatacacagtggtgtgacggcacttcctggtggtcacttgaagtggtgcactcagcagcgggttccatctttcacccacttgccaggcctggcattgaagatttcgtctccaagggaccagggtggccccagcttgagagaggaggctccgatcaatccagggtgctacttggtaggaggtcaagtaaagggcttgatggggaacgaggtgagaaataagaagtgaggctgggggatatcactttcctccatctccccaggccctgtgacctcggataatgcagagctggctccatcgttaagttctgtgctggcagctttaacccctcctgtgggccctcagagcgctgacatctccaggctgctgggctgcaccgccgccctgtccttctttgcctcgtagggaaatacagcaccaaagatatcgtcatggaagtgcttctggctcttttaggtaaaaacagagaccaatgtgtcaagtccaggctggaatgagcccctggggttgcccagcttccctatcacatggaccttcatgagccatctgtcttcccaactgttatactttgattgcgcttgaatctggtttagaccctaaacccgctcagcacctgctctggagcaggccctctaaccatttccaaagctttacttggcattcccatttcctgccctgtgctcatcccccacccaagatgctccaggaagtgtgagctttcagattaacacatttgggaaatgctacatcctttctttcctccc

SEQ ID NO: 481619 - DNA, 1000 bp, Homo Sapiens
tgactgccccagttagaagaagataaactaataccttaaaaatatataagaaaaggaagggtacttgctacttaaacatgaattttcacaaaattatccttgtgactaattcagacaatctatttgcttagaaaagctggcaaaaaaaaaaaaagcacattacatgaatatgccttcatttaagtacgtgctttcaagctgatttaaaaagaaaagttgaattatggtttccagagctttaggagtccatcttcactgtaggtagcaatcaggttctgatgagggtgatgtgcaataccaatcacatccttctcgtgcactgtcaaagttctttccagtttgccagtggctgtactgaaacagtagagcacaaagtcctcccctacacagtagatccattcaccacggggagagagggcacagaaaagtccccaccttctcttttaccagaactgaagtttctgacaatctgcccctgcatgttcatgatgaccactgtgtttgatctgttgcacaccacaaagtgctcaggatttttaggaagtagaatcacactgttgacggtaatatctgtccctgcagtgctgcccagggatttaaaggtatctgaacattctgtggtcttcatattccagatctttacagtgccatcagaggatgcactaataatataatgtccatcttgtgtaaatgttgctttgttaacaaaggaggaatggctacaaaattccttcagggttttcccagattttaaaccatgaattctaattgtctggtcaaaagaagcactaaggatctgactgctatccttagaaaagcttagacacgtgacacccttactgtgtgccctctcatatctccttaaatattgtctactctgaatcttccataccttgatttttccatcttgggccccagttgctaacatttctgtatctctgctgaaacacatgcagaggacagcatcatccatcatcataaagttatcctgggcctggta

SEQ ID NO: 481620 - DNA, 1000 bp, Homo Sapiens
cagctgtatgcatgtgtgcccagctacacttgaatttgagatcaacagcaatattgaattttctaccaaaaatgcatatgctctgtctctgaataaatgtgcaagaaatgaaagttctacatgcccaacaactctttgcttccatttccttacggtcatgaagccacacctgcctggagctactaatctatttcctgagcatcagaacctcttgctcatttggggaatccatctccctgcagttgacctgtggacctccagcatccctgggcagcctgaggaccctaaaccctgtagttcagtttatgacacgcaggcttggaggaatttccctccataaggctgctgtgaactcccacgccaggagaaattaaaatttgtaatacagcggagatcttcgaatgcatcgcgcgcaccgtacgtctcgaggaattcctgcaggatatctggatccacgaagcttatctcttagaagtagagaggagaatggtggttaccagagcctgcggtggtggaggacaggatggaaagatgttggtcaaaggaaacataattattattagatagaagaaatatattttacaagatctgctatgcagcacggcagccatacttaattatgatatattgcagtcctgaaaaatgaaaaggtagttgatgttaactgttttcaccacaaaaaacaataacttttagatcatgcatttgttaattagctagatttaatcattttataatctatatgtaattcaaaacatacataataaacttacacaatgttattttcaattaaaaacaaattttaaaattatgcttaaaaatttttttattcaagctagaatttgaatatagctaaatatcttcaataaataagaaaaattaaaataatttcaaaaattaaaactaagagatttgcttgccaataggagccgcataagagtgtactcaagaagaaaataacattttcctgtataaaggtaaaattaaaatgaaggggtga

SEQ ID NO: 481621 - DNA, 1000 bp, Homo Sapiens
atgttatacatattttaccacagtaaaattttaaactagaaaaggaaaaaatttataacctaacagcagtcgttggagacatgtacacttttcctgctgcataaagttctttagtacactaagtaggacaaatcagctgtttttcttctgaaaatgatatttggtaccaaacttttctcatggcctttttcatctctgtatttctcaggttatagattaggtggttgaacattggagcaataatagtgtaaaacagagcagatattttgtcctcaggaaaagtgagaaggtctaaggtaggcaaagattgaaggttcgaagaaaaagattaccatggtgatatgagatccacaggtagagagggctttgcatcttccctctactgaatgattttttaaggggaatagtataatgacataagagccaaacgacagaacaaggttaccaaggcaaacattccagaattggcaaccacgaggacaccagtgatgcaggtatcagtacaagcgactttcagtaaaggaaaaatatcttaatattagtcatcaattttgttggagccacagaaaggcaaccagattttcatagaaaactgaaacaaagaatggaaagccccaacagccaagcaaccgagattagagtattgtattttgtcctattcatgataattaggtagcggggaggtttgcagatggcaacatagtgatcaaaagccatgactgtaaggatgaagatttcaatgattccaaagaagtgcatgggaaagactcctatcataggagatgtttattcttcccactactagatcaccaattattttgggtgtgacacaggaggtatagtagatattcatatagcctgaagaaatagtgcattggttggttaaaaagaggactacatcaaatagagataaggatcagaaagtttcccaccaagatggcaacattacaaaataagaacacaaaaacaaatatttgtatgttctggatagaggaaaggc

SEQ ID NO: 481622 - DNA, 1000 bp, Homo Sapiens
aacatatgcaaaggaagtatatgtgtcagataatagtatttatatagtttggtaatttgcttaaagaatatcaaggaatctagctcttttttttttttttgccttgtaaacagtagaattttatacaaatataaagttttgcaccttcaaagctatcactctaataagacacttattcaattaaacaaataatcttaaaaactattttaacaatgtacaaatacattcacaacataatctgctgattaagacttcaacaaggtttataatacctacgacagaatttacagatgcctacaatagtttgtagattggtttagtttacagttacatagattgctttaagaaataccattaatacaaatgcataatttacaatatccccattatagcaagaaaacgatagattcagaaaataaaatgtcttttaggcatttattatgccaagtatgtaaatgattattctcattatgacatgagaataatgctcttttagtggtaaaagctctattagctcaaggtccactgaagagctttcaatctagctatcctttctgtaaaataaatagaacagcagcaatctctgggtattccttaaactacgatgattccacttatattaactgggccttaagtagatgacttcttacaaataaaaataaaattttataaagtagttagtaccactggccctaactgttttcacttgcttgcaaacatctaagaaatttccccaggaagtacatattaaaaactaacaattatttctaacttacacagaagccaaagtgctcactcttaccatggaagcaaaactttctcctgaaaacaatctacagaaataatatgtaaacatatagagctttgagacacactaagaacatcctcctatgttctatggatcacaatgcaaaggtctccattgcctatgtaaatgaacactttcgttaacttgggatatactgatattacatggccgtgtgcatacctatggaatgtg

SEQ ID NO: 481623 - DNA, 1000 bp, Homo Sapiens; identical to SEQ ID NO: 308439

SEQ ID NO: 481624 - DNA, 1000 bp, Homo Sapiens; identical to SEQ ID NO: 308440

SEQ ID NO: 481625 - DNA, 1000 bp, Homo Sapiens; identical to SEQ ID NO: 308441

SEQ ID NO: 481626 - DNA, 1000 bp, Homo Sapiens; identical to SEQ ID NO: 308443

SEQ ID NO: 481627 - DNA, 1000 bp, Homo Sapiens; identical to SEQ ID NO: 119949

SEQ ID NO: 481628 - DNA, 1000 bp, Homo Sapiens
aagctttttttttttaactatgtgttttgaaaactactgccttctcagcccgaagatcgccgtctctctcaggctcactgtggtttcctttttctgacacaaaggcaggcacaggctgcccctccacatgtcttggggatcagatcatgccccgggctcataggaaccgaaactttggggcatctgagactggctgattcagattcaaagacaatcacacggaaagactgtgggcagagaaggcaatgcctctcccctgggcctttgctgtcactattacataatggacttgcacttttcctccctgcacttatcactttctgggcttgaccttaattgtaagtgtggtatgagtctgtttccatttaaagcagacagaaagaaactactctggacctgaaaacaacgtgacttgccaatcattagaattttctagttgaaaggcatagatcagccaatagatccacaccaacaagttgcaaaatgtagtttttgctgctggctctcactttccgcccaatccccctttttgtgttttagtggctgtgttgctgttggaaatggtttgtcacctcctcctgtgcagtggctgctgctccacattgcggatcttaaaaaccttcctaatctaaatggcccttgctttacccggccatggctaccctggggtttggagcgtggctatggagggaagggagcgggaatgctgcaagaacaagccgactggattacaatgtccactactgacaggcgcagtgcgtgtgtgtgacccaccgggttcccggggcactgtcccccccgctcccaccccacccgaggctccctccccaccctgcccccgggagaatcacttaaacacggactgaaaggtggggcactcatggtttttcattttcttcatgaagtttttgaactccttgtttttcttgtcccacttgtggatggccgtcagcaagtactggctcttcaccttgcggcccatgatgaggaagtggtggct

SEQ ID NO: 481629 - DNA, 1000 bp, Homo Sapiens; identical to SEQ ID NO: 308447

SEQ ID NO: 481630 - DNA, 1000 bp, Homo Sapiens; identical to SEQ ID NO: 308448

SEQ ID NO: 481631 - DNA, 1000 bp, Homo Sapiens
aacataaaagaaaagcccaaagccattaaaaataaaggaagtagcaattaaaacacccaagggcactaaactgctattagaagaggaatctagcctctcagcaatttctaaaaacgtactttgagggagaaacaagaggtcactctctcagagaagatgaggcaccaggagccaacctggaaggccttcatgacgtgggtgtctacctcggacgaggctgtaggaacagctgtgaccaccagaacagcaggaagctgtgcggttgaagccccagtctgaatccaccaggctaagctgtgagcagggaccacagtcaactacccaggctcttccctctggctggatcaccctccccgttccccaggcctttcctgccaacgtttcttctatctcagggtacatctctctggtagctccctggggatgggctccatcttactcatctgtgcttgctacaaagtagggccttgatggaggttggtcatccagacataacccatgcccaggacgaagcataaaaacacttgtacaatgaagactggttcaatggtccattctgtttattcagaacggtaacataaatacaccttaaatattaacattttttatatacagaaatgaccccactccccaaaaagtttgaaaaaatattgtctcctcctcctttataaaaccctagatgacctatgaaggcacagccaagcccttgatgcatcttcctcagcacaatttggccaacgctggagggaaggtcaaagaggtggaaggaaaatgttatgctgaaaatccctttccaacaagggtgccaagcgccggtcttgaacgaagtaccctgcctaagcatcatttcctaaagcgcttgaagagcgggtgtacatgtttgctgggcgccttgctccgcgatgagtggtactccatgtacacagtgtcgtcggccccagacatagaactcatggtgccaaagcgccgagatgcctgccgggaagggggaaccagccca

SEQ ID NO: 481632 - DNA, 1000 bp, Homo Sapiens; identical to SEQ ID NO: 308449

SEQ ID NO: 481633 - DNA, 1000 bp, Homo Sapiens; identical to SEQ ID NO: 308450

SEQ ID NO: 481634 - DNA, 1000 bp, Homo Sapiens; identical to SEQ ID NO: 119950

SEQ ID NO: 481635 - DNA, 1000 bp, Homo Sapiens; identical to SEQ ID NO: 308453

SEQ ID NO: 481636 - DNA, 1000 bp, Homo Sapiens
ccagcacacccacaactaaacagaatacttcattagaggaaacacatgagttctgttcaaaatctcagcaaaagttggccaactaatttttagaaaattcactgtgaaatcaaaaagacttatccaaagagctgagatgtcgcacccattccattatacaatgttacctcatgaaaatgggctgataaatcagcccacgagttaaatggcaacgcttcattcaggaggctgttctgcttcacgcatctgacaactacttggcaagtgtctgcatctcctaactgcagaagctacagtcttctgaaagacgaaggtctttacacagtttagtgttcggtgttcttggcacacgaatgcagtgtagttcagaaggtattttggcaactcttaatctgagcaagaatggggcttttgaaaaataagaatttaagaagtcttgtcattttagggctaaattttaatagaatatgagtctgaactcttacatttagaacaaacaaaaccttaaacttaccgattggttcaaaatggttttctggaaaaattaatctgtaacaaaaagttggcattgagtgtgaaggttccaccattttttgagcaaagtgtacaaagattccaatggacaggaccaagaacgaggggctcagacatttacaacagcaggcattttctcttcctcttcttcacgggaggtgggcagaggactgcttggatctctttgtcaaacactgttgaggcctcgctgtgtgagtgccgagcacttcaggtattttacagcaccaatctccttagtgatggctagaccctgcagataggtgatgggagtcagcttcttctccttcagtttctcaatcgtgtctgtatcatccctaagttcaagtttagttcccactaggatgatgggagtgttgggacagtggtgctccacctcaggataccactttgcacggactttttcaaatgatgcaggactcacaagggaaaagcaaattaagaacac

SEQ ID NO: 481637 - DNA, 1000 bp, Homo Sapiens
caagtcaaccctggacgcaagtccctgcccaccagggagctcggggtcctggggccggagccgccgggaaggcgaggcgcgcggtgggtgggtggggtgggctggcatgggtgccggtgctcccagcgctggggccggagcgcggaacgcttccctaccgctcccccggggctgacgcacgctctcacggcgcgcgcatcctccagaccttcccaggccggagggaggaggggaggggaaggggctgatgcggttcccgcaccgggatccgggacccgaggaggcgactcgcctatcacgcgccgcccgcggagggcagagaaggcagctcctaccaggcgtccccgaccgtcccggctgccgggcgtctcctgctgcttcctgcagcccgcccggcgcgcccccgccccgaccccggagggcaggtacctcggagccccggcccccaggagcctcccggccgcggtcggagcgtccctccggatcactcatccgacgtcagcgtcagccgaaggcgagggaaaggggcggggggagcgcaggaaccggcccttcctgcggcggccgccaccagccggaatagcaaccggcggagcccgtgcgcaccgcagcgcagcgcagcggccggggggtgcgggcgccctcgccgcccggctacctaccgccgcctgggcgccgccgctgcctcccttccccgcttctaccctccagcagacgcccgccggagcgacccctcccagggtgaccgggggaaggtgggtggcgttgacctcaccttgcttggggagggtcggggactcggggagtgagtttctctctctctactccccggggtctctcctcgacccccatctcctggggtatcccccgctcggatccgccgcccagagtgaccccgcccctgctctccggcaggtgttccacgtggccatagcgtttgcgtcacaatgacctggcggacaggtgggagccacagcgtacaccccagggttccctctgt

SEQ ID NO: 481638 - DNA, 1000 bp, Homo Sapiens
gatctgtatctcttgcggtctctcttgctctggttgcttaggtgccctgggtctctctgcatagctcccttttcaagggttctctcctttgtttctagttatctcttgcattgctgtccaagtctgttcctagccagaggaatggccctagggatctcggcccaagccgaggttgtgccactgcactccagcctgggcagcagagtgagactccgtcacaaaaacaaaaacaaaaacaaaaaggactgaaagaatcctagaaatcacagagatactgaattaccttggcctctggggctgtgtggttcaattgagctggataaatgaaaaggaagcatccctgttttgaggagctctgtctgggttggcctagggaaggagaatggaggtggctatgaggagaaaggtggcggcgctgcggatctttctggggcctcctcatttcctgcatcttttttccttgtctctgtttcctctggttaccttgtcctgtggttgctcaatctctttgtccactgccaccccctcaggttctttccttgtcccctccctaccccctttttctcctctgctgtcacctgctattgtccagtagtgtttctccttctccggcttaggcccttggctctgctgccgcagtcctcagagctcagagctgggtagagagcaggagtgggctccgagtgggtatggttggtgggttgggggagatccagtccagggttgaaccactccttcccaggttcccagtggggtccgacagccccagtgcctttcaagcccctgacctctgtggcccacagtaccaggcctgcctaagcaatccagctgtggcaggaactccaaaggggctgaacttgtttagttggaggagacttactctttcctccacctcctggccctctcgggagccatcccttccctccctctccccagagtcctgttcacacataaccttccccagcccctcatctgtctgcctcccctcaagaatggcttg

SEQ ID NO: 481639 - DNA, 1000 bp, Homo Sapiens
gtcattcttcattttatttgcatgtcccaacaactcatctcaaatactaaattcaaaagaaaaactgtagttctcctcagcattagcactaatttatggtaacaatcatttctttcaaatgtctaacttatttaaccccttcattttaaattgcaaattaaagcatgtatttacatatttatatacaaaaaacttcaaaaacaaattaatccaaatcttggtccaagagtttccactttataagtggtatggtactatgctatatatatcctcttccaaaagtctcttaggacttggtaagttccaaatattcattcacaaatggttcccctttaagcttaatgaaccatatacttcatttctgagtaaattagaggaaatattacagaacacgctttgtacaatacagcactactactgagaagggctcgaggttttgtaatccaaggttctgacttaaagcaaaaatacacggcatagattgcaacagcaaagaagtgtccaattaaagctagagggttaggagacaatacagaaagcagcccaacaggacccgcaacacattcgccaccaagtttgaaataaagaaaacaggcttttcttagttgatgcagggaatcatctgtggcagaaaataattcataaagagcctgagcaaggatattcacgacaaaggaatgagatgtttttcttgcccagtaaaatgatttgttggcctcgaaaatagctgcatcatcataaaggtcagggataccctttagcagttttctccatagttttatatctttaaaagcaacagtcattcctccaccagtaagtggatgcctcatattatatgcgtctcccaaaagaagaacacctcgtttcttcactgatgaaggaggaaggaagcttgctagcatggacctcagatgagaattgtcagtggcttctaagaatggttctttcaggtgatcaggtatttgtgggtaaattttttcaaccatgtattctcttaaat

SEQ ID NO: 481640 - DNA, 1000 bp, Homo Sapiens
gatctaactaggcagagaccagagcctgagccataaaagccattctgcaaatgcagttttcttagtgctgaatgagctgttcaggctcccgcttggtttcccctttaaggtgggaagctcattctcccacaccatttttcagccccaaaggaaagttgctttcctagtcagacaccttggggtggcctctgcctgccctgcaaggacatctcaagtctgttccttccttccttcctccctcccccccacccttttttgtttttgtttttgagacagagtctccttctgtcacccaggctggagtacagtcacctgatctcagttcactgcaacctctgcctcctgagttcaagcaattctcctgcctcagcctcccgagtagctgggattacaggtgtgcaccatcacgtccggctaatttttgtattttcagtagagacggggtttcaccatgttttgaccaggctggtcccaaactcctgacctcaggtgatctgcctgcctcagcctctcaaagtgctaggattacaggcatgagccactgcacccagcccagttctttagaagagaggcctccagacctaggaagaagagggcccagactggggtgggggcagcagctcagggcagccctcgttagagacgaggtctcactatgttgcccaggctggtctcgaactcctgagctcaagcgatcctccagcctcggcctctcaaagtgctgggatgacaggcatgagcccagcccctttctgtgactcttatgttacctgtttattatatgaccaggtctaggtgctcctctagggctggcccatccatcctgaagcctcagtctgacccagcataagagtgactattcatcccagcagggaaactgagacacagactctgttttcccagctgcagcaaagagtggcagggcctttgcccacgaacctaatggcaggcaccccagaggacagctgctgatattgactaaatccttcatgtttctccc

SEQ ID NO: 481641 - DNA, 1000 bp, Homo Sapiens
cacgtccatgttcagctttggtaccacggggacctggaggctggcaggagtcagcggggcctctggcagccagtgtggagccaaggccgagccctccctatatatgccaccagcagaatggcggcattaagggatttctctggaaaggcgtgagctcatgaagaaggctgctcagtcagcagaaacgtggctgggacaagtgcccgcccccagccccaggagcgtgcacggactgtccccgaggcctggactcagctgaggcccgcctgggcaccctggggctcccgggaggcagacaacccaaggaggcgcctgtgccccatactccctggggcgacaatggagcttctcatctgccagtcactgggcaggggctacgtgccagggaccatgctagttctctgcacaccttgtcctgccgggggtttcctcatggtcgccagaggagggagagcacacacccccgttagacacagaggttagacacatcgtcctcagagtctcaccgggcctgggcaagagtgcactggtttccaaagcggagtgcatctgtgaacctccgttacactcaccacttacaaaagtacgcatcgcttgttaaaacgtcgtggagaagaagctgcaaggtgccataattcagcacttggggagcctatggcgtttcatgcttgtcctccaggggtcacatgcttgtcctccaggggtcacatgcctccaacaggaagacgggctgggctgtgggcagatgagagcaccacgtggttgagcttccctctgcgcccaccctggacgccccagccccatgccatcgtcccctcgatgtaacgcctcgagcgttacatctcgtaatgatgtaatgccttgatgtaacatccccacgtaacgcctcgagcctccgtgcatgacctgccgtggctgttgagttgggctgctcctgtcagggtggcgacatgtccccacgtccctgtcacccatgcggacccaccacccacatgatcct

SEQ ID NO: 481642 - DNA, 1000 bp, Homo Sapiens
gatcatgccgtgggcacaacagagaaactctgtctcaaaaacaaacaaacacacaaaaaaagaagtaggagagtagaatgtagaatattaggtgtgggtggatgtgcaatgaattgagggtttatttttaaaattaagatgagtgtattggagcatgtttctgtattcattagaaagatctagaccaacgggctgcttacaaatactaccttgcaacagtagttcacaagacagacatttcacagtatcttctctctcttgctaaatattcacctgaataaaataaatgttattttatcgtcaaaatgggaacactaaagagtttttacttgccatgactttcttttttttctgctttttttttattattatactttaagttttagggtacatgtgcacaacgtgtaggtttgttacatatgtatacatgtgccatgttggtgtgctgcacccattaactcgtcatttagcattaggtatatctcctaatgctctccccgccccccacccccacccaacaacagtccccggtgtgtgatgttccccttcctgtgtccatgtgttctcattgttcagttcccacctatgagtgagaacatgaggtgtttgggtttttgtccttgcaatagtggaagtcggtgtggcgattccttagggatctagaactagaaataccatttgacccagccatcccattactgggtatatacccaaaggattataaatcatgctgctataaagacatgtgcacatgtatgtttattgtggcactattcacaatagcaaagacttggaaccaagccaaatgtccaacaatgatagactggattaagaaaatgtggcacatacacaccatggaatactatgcagccataaaaaatgatgagttcatgtcctttgtagggacatggatgaagctggaaaccatcattctcagcaaactatcgcaaagactttcttatttatgtatttatttattttactttaagttctgggatac

SEQ ID NO: 481643 - DNA, 1000 bp, Homo Sapiens
aaaagagacaggagtgggcagagacacagagacacacatggactgggagagagagaaagtgagacagaggaacagtgataagaggcaaatggataggacataggcagagaaaggtagagacggagggatataggcctgctgaggggtgtcggtgtggaaggtgcagagggaacaggagagagacactcacctgcccaacagcctctaggctttgattcagtgtcacaccctgtgttgctgctacaaggcatgtcactaggatagaactggaccctgtcctcacagaatcccacaccaaaggaaaaatgacagatcatgagacagtacccagaggggtcagggctgtgcctgggaaaggcataggcaatgacaggggctgtgatggtagagccctcagcatagtgggtgggataaggaagcccagatcagagtggtcatggctgtgatgggtggaacacaggcaaaatgatcgagctgtcatgacggaagcatgggcttcctagaacaagaaatgtctgagctgagactggaggactaaaggaaggaattaggtagacatgggaaggaaggtaggagtgtttcaggccaagagaatggcatgtcggctgggcacagtggctcacgcctgtaatcccagcactttgggaggctggggcgagcggatcacttgaggtcaggagttccagatcagcctggccaacatggtgaaactccatctctactaaaaatacaagaaaaattagccagctattagggagcctgaggcaggagaatggcttgaacccaggaggcagaggttgcagtgagctgagattgcaccactgcactccagcctgggcaacagaatgagactccgtctcaaaaaaaaaaaaaaaaaaaagaagagagagaatggcatgtgctaggtacgcaggagagagagagagagagaagtgctctggcctggggatggcctggagtcaatgtggctgtcctgaggtaggaccccagaggaagaacc

SEQ ID NO: 481644 - DNA, 1000 bp, Homo Sapiens
gcatctccgagctccaagcaccactccattccctggcgccagctgggaaatctgcttgtggtgcacctggtccagccatacccttacagagtgctggcaccatgccagcacctggagctgcccaccccatggcagcagccagtatgtttgactgcagtggctggaccccaccctcactcacacatcccttgccgcttcatgcctgagttgcagtctcccttggaggtgtgggatccaggccagtagcatgagccaagcacggtctaccaggccaagtgggtggaacaagcccagcaggcccaagcaaaactcaggcaaaggcaccactggccacagaggtttccagccagaaaagcaatgccccaaagatcccgtaacactctgattcctgagcccactttcttaatcccaaaactcttttgcctcctaagaggtatctgtggattctggctacaacctccctgagacacatggcagtagaatgaacactgaatgggttctagtctaagctctgctaggaataagctgtgagacttggagcaaatccactggcttcctgattcactatggaggggaggctgtggcgcctttttatctcagagggttatagtaaggacccaggggctgggatggtctctggcgcccacaagggacgaagaggggacaggaatttgaggcggaggggtgctatgtacctcggtcagccatggtgaagatggagtcctcagggatgcccacaccctgggcaaccactctgaagtcctgcaggagagtttccctcagctgcggcgcccgccctgcaaggaggaagcagaggagacgcctagaaccaccaggtgcttggagtggaagggcctgaaatgattttgcccagtgattttcacttagggaaaatttgaaaactattgatgcagtttaatctatttgatacactgaaggaaagacaggctcccaagaggaagaggggtctctcccaggttcccacccaggtctcctgagt

SEQ ID NO: 481645 - DNA, 1000 bp, Homo Sapiens
tcttctagaaaaaaaaaaaaaaaaaaagaaagaaagaaaaaaaaaagaaatctcgtcgtgagttaatagctctgcgcggagggaggggatggagagggggtccttgatcgcctcccaacattactgagctacatcacctgagcagtttctaccccgatttctgtaacgagcagtttttctcgttctgtgccggcgcgcgcgcgcacacacacacacacacacacacacacacggctcagattcggccgcacccggcaaccgctagggtgcatggagacacattaggttacataacccttcaccgtgttcgaaaccctttcttgatcgtgtgggtggctctgaaaagagcctttgggttcaggacgccgaggaacgcctcacttggagctggtgtacttggtgacagccttggtgccctcggacacggcgtgcttggccagctcgccgggcagcagcaggcgaacggccgtctgcacttcgcgggacgtgatggtggagcgcttgttgtagtgtgccaggcgggaggcctcgctggcgatgcgctcgaagatgtcattgacgaaggagttcatgatgcccatggccttggacgagatgccggtgtcggggtgcacctgcttcagcaccttgtacacgtagatagaatagctctccttgcggccgcgcttgcgcttcttgccgtccttcttctgtgccttggtgacagcctttttagaacccttcttgggcgcaggagccgatttggacgggtctggcatgatggctgagtctctccaaacagaaacgcgcggcgctcggagtaactctatttgtacgttttgtattcaaatgaaggctcaggatttgctcacttctgattggatcaaacgttgttctacgtcatcgctgggaaaggaatacgcaaattaggagtgccaggttctttttctgattggctaccatagccatccaatcgaacgccgcggtctagcctacctctgtaccatacataagggctcgc

SEQ ID NO: 481646 - DNA, 1000 bp, Homo Sapiens; identical to SEQ ID NO: 308457

SEQ ID NO: 481647 - DNA, 1000 bp, Homo Sapiens; identical to SEQ ID NO: 119951

SEQ ID NO: 481648 - DNA, 1000 bp, Homo Sapiens; identical to SEQ ID NO: 308459

SEQ ID NO: 481649 - DNA, 1000 bp, Homo Sapiens
cttcctacatcttggacgcccatccttgtcagtccacaaagttttgctccaatcagaacaaattgggcacttaagttccattcaacaaatagctgaaaagcacagggtgtccaaggcagctgaaacctgtgcagttttatccttgcactgtgcatgaattcttcatttacctcctatggttgttggaagaatttaaaatgtcaggtgcgatccacacaaaacaactttgctaagcaaaacacaaggtccacagccaaaatctcaacattcctgtgagcagatggaaaataccacccactgaagggttaagagaagcctcagtgatctccccagggctcagatcctgtctgtttatttgttggaagacaaagatttttcacatcagtttgttcttctccattcacttttcagggagtcaagcctccagtggggttgaatacagtagtcccccttatccacagggagcacactccaagacctccagtggatgcctgaaattatggatgtctgaaaccatgggtagtactgagccctaggtacactatgttttttcttatacagtaatggcaggtaacgtctatagcatggatacactagaaaaaattattcacgtcttggccaagggcatccttgtcataaatgttagtttacatatttgattatttccttaagacagatttctatacaaggactgtgttgcaaagaataagcatttctcttttacatttttagtaaatatgatatatccttatataataaattcaaatagagatgtacgtgaattaaaccctgatcaccttccctccctgcattctcattttatataaaaaaatcatttttagtcatttcttgtgtacccttccaaatgttttctatgtttattacaatacgtataaagctggtttgggagttgctaaaaaaatggagagtaaacgtggtctatagttgcactgtctaatattgtagctactagtcataagtggccgttgaatacttgaaa

SEQ ID NO: 481650 - DNA, 1000 bp, Homo Sapiens
gaacttcctaaacaaaaccttacatattcgccagccagtcagaaagtgttgatatcgagtgctgacttgcaactggtcagaaatctgtagagattgcttagtcttcttgaaccaattctgaacagcaaaagcagtgaatttcctattgagccccagtaaaaacatacccaaaatggaaacttccagttttcttgggctcaagacaaacaaacaggggtatctgtacagcctatttctaatcatcctgggctttaaatcacaccattacagaccacactaacagaaaggatgtttctcttggtaagattaacagcaaccaatgaatgtgccagaaaagttgtcctgcacatcgcaggctaccaggaaaccgcaagagccagcccctcacctttggaatttacagtctgaagcaatgtggccagcccctccacacttggtacacactgtggtgttggtaatgctgcgggtctctgagctctgccagggtcttaagatcctattaaaggaaaaagaggtcaatgcaagggaacaatctctacttccataggttcttcaggtctctacactctcctttaaactgatcacatacctgttatcgtcttcccgaagggtcccatttaagcgagccaactcccgaagctgcatcttccgtagatcattctggtcctctggagtctcgataccctgcttcaggatgtttcttatctagtgaaaatgcaatggacagttaagtgcttagggcctccacctaggtttctgccaggaggcttcctttctgggctcaccgctcacctgttccactgcctttttgacgttctccattgtattggcagtaaccagggcatgaagtggctcatcttctcctggcaacatctggccatctttgcgcccaaccttcccttctttcacagaccctttcccccggatcataatcttggcattgcactccttctctatgttcttcagggtgttccctctagagaggcagaaatgactaagt

SEQ ID NO: 481651 - DNA, 1000 bp, Homo Sapiens
gggcctgtaatcccagctactcgagaggctgaggcaggagaatcactggaattcaggaggcagaggtttcggtgagccgagatcacgcactccagcctgggcaaatggagcgaaactttatctcaaacaaacaaaaggacagaataatacaagatgaaagtgcacattttctttttatttttaaattaattaattaattctttaggacggagccttgttctgtcgcccaggccggagtgcagtggcacaatcttggctcagtgcaacctccacctcctgggttcaaaggattctcctgcctcggcctcccgggtagctgggattacaggcgcccaccaccacacctgactattttttgtatttttagtagagacggggtttcaccatgttggccaggctggtctcaaactcctgacctcaggtgatccgcccgcttcagcctcccaaagtgttgggattacaggtgtgagccactgcatctggcttctcttggtcttctgctgagtgagcaagtccccaaggacttggggacagatgtgaggtggagccctgagtgatttgctgaagtgacttctggggtacaggggctacactgttggagtctgcggtgtgtggcaggctgggttatgtggggctcaaatgtctgagcctcggtctctcctctggacagcagggtggggtgccttcaggagcaggaccatccgggctgttactgtagctcctgctgccccccaccccgctcttgactgaggggtctgcgggcagcgacaccagatcccactggctgggctcacccttgagcagcagaagctgcatcctgcttctgagaattctttatggcacaggacaaagaaaatcatggctgagaggagagcaggttttaagaatttaggatgagggccgggcgtggtggctcacgcccataatcccagtaatttgggaggccgaggcgggcggatcacctgaggtcaggggtttgagaccagcctgcccaacatgg

SEQ ID NO: 481652 - DNA, 1000 bp, Homo Sapiens; identical to SEQ ID NO: 308460

SEQ ID NO: 481653 - DNA, 1000 bp, Homo Sapiens; identical to SEQ ID NO: 308461

SEQ ID NO: 481654 - DNA, 1000 bp, Homo Sapiens
cccttgtcccagccactcaggtgcctgctggccgcctggatgctggtggccctgccccaggagtgggggtgcagtgtgtggatgtgaggagtggataggccacggcgggggtactaggccccgggggaacgcctgtaccttcccacccaggccctggtgggagcccggccaacccctttaaataatttcaggaatgggttccaaggagagctcccagggtgggcacatggggggccctaggtgcctgcacttctgccctcccaacacccaggtggccacagctgggaggggcctgagtcaaccccagccctgccctcctgaccttgggaccgtaggatgtccctctcccgagtggtgtgaggggctggggtggaatgcggcggcaggaggccagagtgctggctgggcctgaaaggcctccagctctgcctgcccgcttactgcctcagcttccctgccccacaaagggcctgaggtgctgcctgggcatgtgtaaaggtggaggggtttcctgccctgcccaccacagccaggagctcttctgaccttccctgaaacttctctaggcctgcagggagcagataactcctggggagtccccagccccatgtacctcccactcctgtgcccagtcttgggccctgcgtccagggcgtttcgggatgccactgccaggggcaccttggctgctccaaggccatctccaaccagcccccaagttcaggcaggaggctccggggcgtcaggcagggccacggcgccttcagccccgggccgcaggcagcagcagcagcagcagcagcagcagcagagattcagggagctggacgcaggcagctctgtgctggcaggacctgaagcagtgactgcatctggccctccctgtaggggacggtgacacctgctgcctgggctcactgtgggcattgagacatgagtcctgtggtggggctgtgcctggtgcaggtgcaggctggagccccggtcgcccccaggcagc

SEQ ID NO: 481655 - DNA, 1000 bp, Homo Sapiens
ctcggccggcaggtgccgccgctgcctcggtccgcggctgcaggggacgccgctccgcgcagcccgccgccttcgtccgcatactaatgagggggcgccggccggccgccagcccggtaccccgcgcccccacccgcccccagcgccgctctcgcgcccattcagctgggggccgccgctcccccgctcagatgcggaggaggggcgcgtgggcggggtctgacgtcacgaggacgcggacggccaatcggagagcacgatgcctccgcggcggcccccgcccccgggcgcgcggccagtcagccctgcggtgcggtgggcattgccagagcagggcgccccctgcagggacgcacccggggcgggggccaggctggggcgagccccccttggttctggagaggaaatgacatacagtttgtgaaagcataaatattcgtgaaaataagaaaattcaggaaggaaacaaagcttaaggcagtgattgataggttatttcttggacacagctgaacgtatactgtgcgcctgcaactttccggtggtttcggaccggacttcagtgaagccagtgaagtcggtcgacttgcagaacttcctttcagaggggcgtacacagcaccgcggccgtgtgcctgtgatctccttctgagtttgaaaaagaagatcctagacaccgagccaaatatgtttgcataaaccgggagacttgtggctctattttgtaacagcttggcgcagggcagctggtttggagatgtctctgttcttcccttggtgggggtgccggaaaaaatgtgctgcctgggcgatcgaggttggggcaaaagcgttgcaaaggaaaaggtgggaggactctactttcacatttcccaaaagagttttaccataagactatttctggattgttctaacgtgaggatattgggagcattttgaaaatactggaggaaaagctgtcactgggcgatttaaatccggtaagttggccaaggcagag

SEQ ID NO: 481656 - DNA, 1000 bp, Homo Sapiens
gaaatagtcatagatggatgctgttacacttttgaaggagaatgatacaatacacagtgatgattttagcttggtggtcaaggaagccctctgagctgagttctgaaagacagaaaggcactggctatgcaaaactgtgggaaaagagtattccaggcagaaggaagaagaaatataaaagcctaaggtaagaataggcttggcattttaaagaaaaaggttcagtgtggctaaagcacagtgacaaggagaaaattctacaagatgaggatgggaagtcagtaggggctttataattcctgttaagtacttcaagtagagagcaatgtgaatcaatttatatttttaaacaatcatttttgttctttgtggagtttgacagtaaagaaagaaagggaacagggagactggttagaagtctttagcagtggtccagacaagaattaatagatagctcctaagtttttgacttgataaatgtttaataaaatggagaaagaccagggtagaaaaaaaagatttttatttatttgattttagtttatatttggagacattgggtagaggggagtaggaatcaagagttctgttggctataaaagccttgacctctgtgaaaagatcagggctgaagaaataaatttggaaatctctagcatatagagccccttaaaggctaggaatggatgagatactaggagagttatcttctatctatcttctcctagacagaaaagagaacattagtgtacttaatacaaagaacacaacatcagaccattaagactcttaacaactaatttattttaaaatagacaaactattaattgtagaaaatagtaacatagcaattttaaatgtacagttttaaccaatacaaaaaagcaataaagcaataatatctgaagcattatttaagaaatctcaatacacgatctctgaagttcctaaaattctggcactaattctaatgtgaacttagtagcaaaagacccagaaa

SEQ ID NO: 481657 - DNA, 1000 bp, Homo Sapiens
gatctcggcttactgcaacctccgcctccccggttcaagtgattctccagcctcagcctcctgagtagctgggattacaggtttctgccaccacacccggctaatttttgtatttttagtagagacggggtttcaccatgttggccaggctggtctcaaactcctgacctcaggtgatccacccacctcggtctcccaaagtgccaggattacaggcgtgagccactgcgcctggccattttatttttatttttatttttttacattttatttttggttcatggttttttacattttattttggtacaattttattttggagacaggttcttacctcttgccccactctttttcacccaagctggaatacagtggtgccatcatagctcactgcaaccttgacctctggggatcccacctcaatctcccaagcagctgcaactacaggtgtgcgccaccacacttggctcattttaacttttttttttttttgtggagatggggatcttgctatattgcccaggctggtctcaaactcctggtctcaagcaatcctcctgccttggcctctcaaagtgctgggattacaggtgtgagccaccatgcctggtcaatagctctaaaatggatgtggggttggctgacagttggccaatccaggccgggctcagatgggaagttctgcttcatatgggaaccttgtggagtgcaggctgaggggagaggaagctctcaggggaagcccgtctcatggtgatgctgagatgcaaaaagaaatgttcaaggtctcttgaggcctaagctcagaactgacacgactgtcacttgtgcccctctgctattggccaaagcaagtcacatggccacaccaaaagttcaaggcccatcattttgtcgtcctccacaggtaaggattatatcaggtgtgcttttcttaaatgggtccacacactcgtacatccacacacgatcatattcatggaatatctctggaagtata

SEQ ID NO: 481658 - DNA, 1000 bp, Homo Sapiens
gatcactctgactgcaatgtagagagtggatggggtgggggcaagaggcaggaatggagggagggcgttcagtaggaagtctttcaaactggcctggaagagagacggcggtggcttccatggggcctgcagtagtcagatagtgagaagtgaacatgtattttgaaaactgaagccaactagaaccaatggattagatatggaggaagaagaaggaggagtcaaggatggctactgagattttggcctgagccactggatggatgccggtggtttgggttctagtctcaattctgctggatgaccctgggcaaacaagtgacttctctctgctgacgctcagtttcctcttctgtaaaacggggattgccatggagatgtgatgagattatacatgaaatgcacagggctgccacatagcaagcacgtaaactgctgttattatcattgtcatcattcctgcgccgctaacatactgatgtagctacacgcatgggctcaggaaccagtcaggcctaagttgagttcctaagttgttatgtgaccttagggaggtcacttcacattcctgagcctcagggtcctcctctgtgaagggagttaatgaaaataccctccctccagacccagttgtgaggattcagtgacgtcctggacgtgaagtgcttagccctcagtgtagctcacagtagttggtcagttaacaggacctaaacgctagagtaatttgagttttcttctctgtgtatgtttggtgaacagtgttgatgaaaagagtcaaactgtaaaatattttgaagagatttattatgagtgaccatggccccgtgacacagcccccaggaggtcctgagaacatttgcccaaggtggtcagggtgcagcttggttttataattttaggtaggcatgaaacatcaatcaaatacattttttttttcttttgagacggagtctcgctctgtcccccgggctggagtgcagtggcgcgatctcggctc

SEQ ID NO: 481659 - DNA, 1000 bp, Homo Sapiens
ttttttttttttcttacaaaatttattaaaaagacatacaaacaacatatgggagatgagaataagattcctctaatacaaaggcattagggtaaataatatttcaggtgctagacagcaggcatggcacatttattcaccaagaccagaatccctgggggtaatcgcttccgttttttccagcccactattattagttgtgagaagtaatttgcttgacttgctttcattctctgactccagttttgcagcctcctcccaagtagttgctagccgtttcccaagggtttctggaagctttagtgttaacactccactcaggagggccatagtcccaacaaacaactgtggtatgaagatccaaatgctgctgaggtccacagagaacggcgccaggatgctggccaggcgacacaccatgctgccgcttcccacagccagcgatcttacaatggttggatacagctcagctgtataaagataaatgaggccaaatgctgccccgatggcaaattttccaaccatagctgtcaccacacccaaaatataatgtttctgggggatcaccataacgacaccacaggccagtgcactgcagaaaagagagtaggccaggactgttctcctcccgaccttgtccatggcgatgcacacgaaggtgtaggcgggaatttccactacacccaggaggaagaggtttaagtattcattgcctcctaagttaacagaattcaaggaaaacgagtagaatcccaaacttccagtgaaccagattagccaaacggtaagtgtccttttcgtaatgctccagttataaaacagatatgataggttgtgcttctgaacttcagtggggctattactaacaggaccttgtaggtccagtgataaaagttctgacagtttacaggagcttgccctgttccacttggccatgatgtcaactattttttgtgcttcttcatatcgtccctctgagagaagccaaaaaggtgtctct

SEQ ID NO: 481660 - DNA, 1000 bp, Homo Sapiens
ttcggcacgaggattgcaattcgttccagactataaattctctttaacaactccctaaggtattcttttaaattgtttttcagcgttgctaaatgtgcatcataatgtgtgggagacttgtataaagtgaatcaatttatactcagctgattaattgacccgatgttaccacctccaaggaggcacctttccactattttctcattttttccccaacacatgttatttgttagtgaggaagctgcgtgcacgtggcattgtataaagtttattagacagacgtggcccttaaactaggaagagcttagtctaactctaaatctaaaattcgacatttcggtaagttgtgagacaagatacccaggttgtttgataaaccagaattgaacataattttttaaaaatttaaatcacaggaatgtttttcttgaaggcatccagcatctccagttagcagtactgattttttttccccccaacaaaggaacactacatcaacactgttggcggggacctggacacagaagactcctgtttcaagaaaatacaatcatctctcaaaggctgtaatttatatgcattttaaaactctaggcattgaaaaccacccaagtgtcccaaatagaagggtaatatataatcaatcactcagtgtaatattatacatcctttaaaaatgttattgggaaatgttttatgatctgtaagtccaaggaatcctctcccaccatttctttccccccgctgttcccccatacccacacttctttgttccaattggcatgtaaatttggttttcccgccaaatgagtcagtcatgatgggaacctcaactgatttgaacagatgtgtgtcaatgttacttggaaaactagatgtcaataaccagggtcacagaaaaaggcagtggtcacaactctgtaaaaatgtatgcatgcacacagacaagaactaaagtggaaccccacacaggaaaacagtgggctgtactccagtgctg

SEQ ID NO: 481661 - DNA, 1000 bp, Homo Sapiens; identical to SEQ ID NO: 308465

SEQ ID NO: 481662 - DNA, 1000 bp, Homo Sapiens; identical to SEQ ID NO: 119954

SEQ ID NO: 481663 - DNA, 1000 bp, Homo Sapiens
ggggcgctggctgggtgaggggtttaaagggctgccgccgtggtgatgtcagcctcccccactggctcgctcctcggccccctccctgctagaggaagccggctccgctccccacccccggctcccccagtgactccacacaggctccatatttggggaaagacaccaagttggagcagtctaccggggctgccgagacattctctgcatgctttggagatggagcgggccggggcggggcacgctgccggcggggagccggcccgggaaaagccttttatggacaggaccctgcccggacttacggctgctcctacttcactgttctctggccccgagtttgagaagagggggagttcaatagagtctggctggagagaggggcaaggggctggggagccgggaatcccaggggtttgtggggacaaaccagccaccctctcctcctggggcttttagctctgatgggacatgggatccaacctttcctgaggacctactccacaccaggccctttgcagtgctctcattgaatactcacagctacagtgtgagggtgtaattacatccccattttatagatgaggaaactgaggccccgagtgcgtcttcctcaaggccacatggtgaatggtaagtggcagatcctgcacacctctgccaacccgcatgggtgcaggagaggtggtcagacccaccctttcaattggaccaccctgctcaggttgagaagagctttcagtgcaggtaggtcttgagttatatgctttagttggggctgggatttgagggttcggcagaagctgagtccaactccggtccccatccagtgggcagtgtcaataagagggtctataaggcctggcagggcctgagacactaacgcaggagaaggaggctcaggaggctggtatcatcccttcctccctttaggaacagtccctaccagcctggaaaacagaccagcctctgtcactccagagataacccactctcatct

SEQ ID NO: 481664 - DNA, 1000 bp, Homo Sapiens
gagttccaaccccaaaaatattccaggacaagatagggggcaggctgggctggttcttcttcaatgggcttttgccgccaaggaggacagtggacttggcccacatccaggctacccccagcccgcttctcccctgcttagcccagggaggagacagtagaggtgatgggggcagccgggagggaggggccaaggcagtgatgctttcgggtaagaagttgggctgaggctgggggcacagggaggagctgcccaggtgcagttaccattgctcagtgacagagcctcaaagcttggccagggctgaaggtaccacacgggtgtgggtgaggcaggctaagcgggatggctgcagccaaggagctgggggagggccgggctcagggctagccctctccgctctaactgatgatctgccgaggtcgtccgtagcctgtcatgccggcctgggaggcccctctgttgctgcccatctgaaggccaatgacatgctttccctcctgcagctggctctctgtgaattccctcttatgctcctgcgctttcctagaagaggaggaaccaggataaagacttggtagaactgtgtgttttccacccgttttctgatccctctgttacgtcctagcccaatcccattgccttcctgttgcactttttttccctaatctagcttgcctcataggctagggagactgagcgcaggagggtggaaagggaggggtcaaggagtattaaggacccattattccccatcccagaccctcactttatcctttcttggctatctgcttcccctaatccttcccgcaagctccttagaacaagccacctcccaccccatgcggagacccaagctccctgggggccacatacttcataaaccagttgggatctccacggtagtgcccatcattcttggtcactgccaagctgcccaaagccatcagggtcctctgcactgctgccatgtctttgcctgtgagaagacaggagagag

SEQ ID NO: 481665 - DNA, 1000 bp, Homo Sapiens
gagacagagtcttgctctgtgggctaggctggagtgcagcagcacgatctcagctcactgcaacccccgtctaccaggttcaagcaattctcctgaaatctttatttcataatctaatctgattcaaatgtggacaggatggtcttgttagtttgtcaccagtaacaccacatattcccttccacatgggaaattcacaaactctctatggagcattagcaagcacaaacctctgatagttactgacactgtcccattctctttatctgagcagttcttttggaaatacttgagatgatgggaaagcaaagaaaaaaactttgccttagccaggcgtggtggctcacacctgtaatcccagcactttgggaggccaaggcaggcagatcacgagggcaggagatcgagaccatcctggctaacatggtgaaatcccatctctactaaaaatacaaaaaatattatccgggcatggtggcaggcgcctgttgtcccagctactcaggaggctgaggcaggagaattgcttgaacccaggaggtggaggttgcagtgagccaagatcacgccactgcctccaggctgggtgacagagcaagactccttctaaaaacaaaacaaaacaaacaaaaaatcaatacaattttgactccagtaactcttctaagtcacagaaatatcactggggagcaaagcttgaaggctaaaatggcagctacggccaccagcttggcttccaaggcacctctcttgcctcttacctcttaccacgagcatgactttgcatgaataacagtttaggaagatggatgcccatgctaaggatggcttagactctccagtggtcactgggataagaggatttaaataagacaaaaaggaggtgaaactcacagggaaggaagcacttactccagattccaacgtgcatcccagcatgtagctgacagctagaaaacagggcagaagggaagaacagaacaaaacgaagaagacacgg

SEQ ID NO: 481666 - DNA, 1000 bp, Homo Sapiens; identical to SEQ ID NO: 308467

SEQ ID NO: 481667 - DNA, 1000 bp, Homo Sapiens
gtcctggaggcgttcaagtctagaagtttccccagccccactcactggcccttccctaatccctccagcctcgctccctctcctggggattcacagcagggtcaggctcagagtggggacagaaggacgggcttctgcaccctgccctagctcctgtccagcaggtccctgggcaagtcacagtcgcaggaacagaaatctgggagagattggagactggagtggagcgctttgtgttgtatcatggggatgtggggtgggcaggaggggtgagtataggcccagggaggggagtgacttatctagggtgctccagcaggttagtggctgagctgggactggagcctggtctggagctttctgccacaccccacactaccgagccacattctgcgcctcagtttccttgtctggacaatgggagtgtggatgcctaccccataaagttgttttgagaatgcagtaagataatgaacgggaaggtattttgcaactgagaatgtatcatatacatatatatatggggactcgtgactcctgctattatgaaggaggaggaagagaaagcggaagaggaaggggaggaagaaagaataaaaattacccatacagaagtgatgttccaaaagagcagggattcctgtggggtttgttctcctgtgtatttccagtgcctaactcctggcctgacacatagacacctggtgccctggcactcttccctcagccatccctcccaacttcaggcattctgggtcctccgggagaagatcgacggagagggggaccccaacccctgtcatataaagggcatctggggcccacctccagactctgcacataggaagagacaaggactcagaggggtctggctggggtgtgcctctgcccccacccagggaacatgccttccccactgctggagtgcagtggctcagctcactgcaacttccacctcccaggttcaagcaattctgtcgcctcagcttcctgagtagct

SEQ ID NO: 481668 - DNA, 1000 bp, Homo Sapiens
caataagcatctactgagtggacccaacgcatgagaggacagtgccaagcaaagaactcaaatgtccaaccagctgggcatggccaggtagcccatgctgtgtctggacgtcctcctgctggtataattattttaaaatgacaaggacagggaagggcgcagtggcttacatctgtgatcccagcaatttgggaggccgaggcgggcggatcacctgaggtcaggagttggagaccagcctggccaatatggtgaaaccccgtctctactaaaaatacaaaaattagcggagcctggtagtgggcgcttgtaatcccagctacttgagaggctgaggcaggagaatcgcttgaacccaggaggtggagggtgcagtgagccaagatcgtgccattgcactctagcctgggcaacaagaacaaaactctgtctcaaaaaaaaaaataataataaataaaataacaaggacaggaacttgattgtcaaatgcaaaaggtgacaaggcagagtgcccaagttcccaggaatgttctatacggactcattaacttacacgaagttctgccttcccctcctgccacatggggaaagtggtattaggtctggaggggggatgccttttttaaaaaattgaaaattatattaggatcagtctaagtgtgttttaacaaactacactctgatttaagtcaggagataatgctcattaatttttgtcctctgcagtcacctgtttccaagtaaagtcttttgggtgggagaggcaggtgtcccaagtggaagatttgtggttgtttgcagctgagtcaatggcaggaccagaagatgacatacaaggagcagcttgtagacctgagacacactcaggaatgtcacagatgtgggctctgaacccacttcttgaggtgatccaaagagagcagacagagatcccaaataccatgttccgagatggcttttgttgttgttattgttgagacagagtctcactctgtcgcct

SEQ ID NO: 481669 - DNA, 1000 bp, Homo Sapiens
ttttttaagggcgcagcatttgtctttatttttcctcagcgactaaaggcagcagcagtgccctgaagattagcagcagcagcagcagcaggtggcaggaagaagtggagggaaaggacaccaagtcttggggagagggaaggacccttcttcggccttagaggggagaggagaaccctgaagtgggccctcccagtcccatctctgggcacagatcccaccagtctgctcaccagtctgctcagtcaaagcagagtgggtgcactggggtggacgtgtcagccctgagcacccggcctccaggctgcaggaatatgagccagtgtcttcactttgctcgtgcctcagttttacaattgtaaaatagggcactacctagaatactgggtacattttgtgtgtgagtaagaagggaccgcaagagcccttggcttagggaaaagcagccggtcactatggggtggagagggtcagacgtgtggcagtggcttactggggttaagaagcagcagtcccaggggctcagaggctggggcggcctggtatgacacagcaaggaagaggcctttagaaatgggacaaagtcatgccctgcccccatggatacatcccctttctctcctgtttcagcatcttcaagaggatgagtcacttccttaattcccacaatccagaggccaagtgcaactggtcacccacaacccctacttgtatgcctagtgccatcccaattgcctcctcctccatctctaccagcgtcccctccagtctgcacggggcagtcctcctgggcttgacctctctgtacccacagctgggggccaggcagcccccctctatccctcccagcacctcatccctctccacgtacacaacagatcccccaagtgctgagaatcaagctcccacctgcccacagcgtgcccacagatggcatccctggatggcagctcaggtggactgagacacttgagtcatcgctcaggaggtccttctggga

SEQ ID NO: 481670 - DNA, 1000 bp, Homo Sapiens
tttttttgtttcattttgttttaactttttttgagtcagagtctcgctctgccgcccaggctagagtgcagtggcatgatctcggcttactgcaacctccgcctcccaggttcaagtgattcccctgcctcagcctcccgagtagctggaactacgggcatgcgccaccacacccagctaatttttgtatttttagtagagatggggtttcaccatgttgcccaggctagtctctaattcctgggctcaaagcgatttgcctgcctctgcctcccaaagtgccgggattacaggcatgagccaccatgcccagccctgacctctgttttaataaggccactctggctgctgtgctgcaaatagacttcagggagcaaggacagaagctgggaggccagagagcaggctcttgccataatccagatccaagcttttggccactaggacggggaggtagcaatggaggtgaggcgcggtcaggtcctggggctgttttgaaggtgaagccagtgggatttccctatggattggaagtggggcatgaaatagaggagtcaggggtcactctggggatttggcctggagcagctggaagatggagtggctgttaacttatgtagggaaggctgtgggaagaagaggtttaggagacaaggatagcagttcatttatttatgtatttatgtaggtatgtatttatttatttatttagagatgtagtctcattctttcgccaggctggagtgcagtggcgcgatcttggctcactgcaacctccacctcccaggctcaagcgattctcttgcctcagcctcccgagtagccaagtagctgggactacaggcatgtgccaccatgcctggctaatttttgtatttgctttttcagtagagatggggtttcaccacgttagccaggctggtctcgaactgacctcaggcaatccacccgcctcgacctcccagtgttggtattataggcgtgagccactgtgcctggc

SEQ ID NO: 481671 - DNA, 1000 bp, Homo Sapiens
agggggtcatgtggtcaataaaagtccttaggtgctgcctaagctgctgtcctgcactgacgccgcctccttggggaagggctcatcttgacctcagccagcccaagctaggggttttgcagttcaagagagatcgttaggctgggagtggtagctctcgcctatactcccagcgctttgggaggccgaggtgggaggcgtgcttcagtctaggagttcaagaccagcctgggcaacatagcaatattctttctctacaaaaaattaaatcagtagggcatggtggtgcgtgcctgtggtcccagctcgggaggctgaggcaggaggatcacttgagcccaggggtttgaggctgcagtgacctatgactgcaccactgctctccagtctgggtgacagcaagagactgtgtttaaaaaaaaaaaaagaaaagaaaagaaaaagaggccgggcacggtggctcacgcctgtaatcccagcagtttgggaggccgaggcgtgtggataacgaggtcaggagatcgagaccatcctagctaacatggtgaaaccccgtctctgctaaaaatacaaaaaatagccgggcgtggtggcaggcgcctgtagtcccagctactcgggaggctgaggcaagagaatggcatgaatccaggaggcagagcttgcagtgagctgagatcacgccactgcactccagcctgggcaacagagtgagactcagtctcaaaaaaaaaaaaaaagaaaagaaaaaaaaaaaaaagatcgttagacacccattgagcatagccagggcattgacggaggactaaggaagcctccctcacctctgaggcagaccatcctgggttgggtctggccagtgactgatgcagaactttcttcatcccaggggatgcctaaaggaagggcacacatggggagcagacaccaaggcactgaagtcaaggggctcggcccaggccacttggcgagggagggacagaagaaagagccaagccat

SEQ ID NO: 481672 - DNA, 1000 bp, Homo Sapiens; identical to SEQ ID NO: 308468

SEQ ID NO: 481673 - DNA, 1000 bp, Homo Sapiens
gatcatgatatatctcaggaggagtgttgctcccgagtaccggtcgtactactggtgggttaggaatatatgcccaataagtttttgcctctgcacagggaaaacataccgcacaggatattacagctagcatggccataaacatggagtcaggggttttgctccagcagtttctcagcttcctgtgtggttttcttgagctgtccccattttatgggggttgatgtcagtgtgactccagtcggtccttgttctgtctttgcattcagattcaactagctcatggctcgtactggaggagctgggcccacagttgagatccatggatttctccagtctcccgttccatggtcacacacaccttgagggcacccacacggattgtccatctcctgtaaaaacacaagcaaaccctcgtccccatatcagtaagtctaccgggcctttccattgtccttcttccggggatttctgtaatacctttgggtaaactttcctttttccctctaacatttgccaatgtcattctgccagagtcttaatatccataccaggagtcaaaaaatttaaagtaaataaggctaaatgtaattttgtttgaggtggtagctggtctcctagtccccatttttgttttttcaacatgcattgtaatgtttgatgtgcccactctatgattccttgtccttgaggattgtaaggaatttctgttttatgagtgattgcccataactgtaaaaaattttgaaaagcatgactaacataagcaggtccattgtcagtttttcattgtgtagggacccccatatgggcaaaaggtgacagacaatgtcatcagacatgaccagctgtttccccagtttggcacgtgacatgtagcatatgggagtaagtgtctgtagtcacatgaacatagctgagtttgccaaaggctgctatatgtgtaacatccatctgccagatttcatatggagccaagcctagtgggttacatccttcc

SEQ ID NO: 481674 - DNA, 1000 bp, Homo Sapiens; identical to SEQ ID NO: 308469

SEQ ID NO: 481675 - DNA, 1000 bp, Homo Sapiens; identical to SEQ ID NO: 308470

SEQ ID NO: 481676 - DNA, 1000 bp, Homo Sapiens
gatcccctattcaaaaatcagaacattcagccgtgtttccaaatttctggctttcccgggctcagtggctcacgcctgtaatcccaacactttgggaggccaaggcaggaggattgctggaggccaggagttcgagaccagcctgggcaacatagcaagcactgtctctacagaaaattaaaacaaatttctaggttttcctgaaaaacaaaatctggcaatgccaagcaactattggttggagctgagtaatgattgctccatttactaatactaaatacttaatatttgagaagctcttattgtctgccagacacagagttataacatagtgagctgaaaactcactatgaccctttgagctggagctacagggttaatttttttttttttttttgagacggagtctcgctctgttgcccaggctggagtgcagtagtgcaatctcggctcactgcagcctctgcctcccaggttcaagcgattgtcctgcctcagcctcccaagtagctgggactacaggtgcccgccaccacgctcagctaattttttgtatttttagtacagacagggtttcaccgtgttagccaggatggtctcgatctcctcacctcgtgatccacctgccttggcgtcccaaaatgctggtattacaggagtgagccaccatgcctgactgctacaaggttaatttttaaaaaatgcagtggctcacatctgtaatcctagcactttgggaggccaaggtgggcagatcgcttgaacctaggagttcaagaccagcctggacaacatggtaagactgtctcactaaaacacaaaaattagcattgtggtgggcacatgtggtcccagctacttgggagcctgaggcaggaagatcccttgagcccaggaagcagagactgcagtgagccaagatcgcaccactgcactctagcccgggtgaccaagcaaggtctcaaaaaaaaccaaaaaccacaaccaaacaaaaaactca

SEQ ID NO: 481677 - DNA, 1000 bp, Homo Sapiens; identical to SEQ ID NO: 119955

SEQ ID NO: 481678 - DNA, 1000 bp, Homo Sapiens
tgaggaattgccacactgtcttccacaatggttcaactaattgacactcccaccaacagtgtaaaagcattactatttttccacattctctccagcatctgttgtttcctgactttttaatgatcgccattctaactggcatcagaatgtatctcatcgtggttttgatttacatttctctaatgacccatgatgatgggctttctttcatatgtttgttggccgcataaatgtcttcttttgagaagtgtttgttcatatcctttgcccactttttgatggggttgttttttgcctgtaagtttgtttaagttccttgtcgattttggatattagacccttgtcagatgggtagcttgcaaaaattttctcccattctgtaggttgccagatcactctgatgatagtttcttctgctgtgcagaagctctttaatttgattagatcccatttgttaattttggcttttgttgcaattgctattggtgttttagtcatgaagtctttgcccatgcctatgtcctgaatggtatggcctaggtttatttctagcgtttttatggttttgggttttacatttaagtctttaatcaatcttgagttaatttttgtataaggtgtaatgaaggggttcagtttctattttctgcacatgtctagccagttttcccagcaccattaaatagggaatcctttccccattgctttttttgtcaggtttatcaagatcagatggttgtagatgtgtggtgttatttctgaggtctctgctctgtaccattggtctatatatctgttttggtaccagtaccatgctgttttggttactgtagccttgtagtatagtttgaagtcaggtagcctgatgcctcctctagctttgttctttttgcttaggattgtcttggctatacaggctcttttttgattctatatgaaatttaaagtagttttttctaattctgcaaagaaagtcagtggtaccttgatgggaatagca

SEQ ID NO: 481679 - DNA, 1000 bp, Homo Sapiens
ttttttttttttttttttttgaagtcttacattttatttaaatagcctccagtaagaagagagtgggccaattactaccccttccttgtaaaatgaagtaaccaagccaaggagggtaagtgcacccagcagccagccagccatgtgatgggtggggtgcctctcagtgggggcggccacgaccacggccccggcctgctgctgtgggagcatccacagtcgagcgggggttcttgatggtttcatctacagacacgatcaggcacgcagcctcagaggctgctgtcagcgcattgatccgcaccatagctggctcccacacgaaagcttcaaagttgtcagcaatgtcctcgttgttgatgtctactccataccatgtacccccctgggcatgccgagcccgcagcttgttgagaatgtttgtggcatcaaagccagcattgtcacacagctggcgtgggataatctccaaggccttggcataagccccaatcaacagctgctgttttcctggaatagtccttgagtaatcccgcaggtacttggagagttccatctcaatggccccgccaccagccaccactgaatcattcttgatggccctcctgacgatcatgatggcatcatgcagggaccgctctgtctcctccataaactgctcggcgccgccacggagaatgaaggtgcatgtcttggccttggggcagccagtaaaaaaattgtacctctcgcctccaatctgggtctcttcaaacacctggcatcgacccagcacatctgctgacagagcattcacactggtctggattgagcctccacaggccatcattgtcctcttcagatcctcctcaggtactcggccagcacagaacatgtccctgtcagcaaagtactgggtggccacatccccaatggggagtttggacaagacaactttggctccagaatgatggatcttctctaacttgtcatagagaatgttccactcagcatcaacaat

SEQ ID NO: 481680 - DNA, 1000 bp, Homo Sapiens; identical to SEQ ID NO: 308472

SEQ ID NO: 481681 - DNA, 1000 bp, Homo Sapiens; identical to SEQ ID NO: 308473

SEQ ID NO: 481682 - DNA, 1000 bp, Homo Sapiens; identical to SEQ ID NO: 308475

SEQ ID NO: 481683 - DNA, 1000 bp, Homo Sapiens
tcgagaattaccctcactaaagggaatacataggatcttttactttgtgcatttagcccatttacatttaaagttaaaattgttatgtgtggatttaattctgtcgtcatgatgctagctgattatttggcagacttttttaatgtgtttgctttatagtgtcactggtctgtgtacttcagtgtgtttttggagtggcaagtaattgttttccttttccatttttagtgcttccttcagaagcctttataaggcatatctggtggttacaaatatcctcaacatttatctgaaaatgaccttatttttatttttctcatgaaacttagtttggtctgatataaaattctaaattaaaaattattttatttgagaatgtaaaatattggcctccagttccttctggtttgtagggatttggttgagagatctgctgttttactgaggggcttctttttgcaggcaacctggcttttctctctgtctgcccttatcattttttcctttcattttgacctcagtgaatctgatgactatgtgtcttggatatgatcttcttgtggagtatcttaatgacgatctctggaattcctgcatttgaatgttggtctgtcttgctatgttacggacattctcctggatgatatcctgaagtgtttttcaacttgattctgttctccttgtctcttgagtacaccgatcagtcatagttttggtctgttaacataatcccagttttggttttgttcatttcttttctatctttttattttttggtctggctttgtatgcctgtcttatttcagaaagacagttttcatgccttgaaattcttttcttcatttggttaatctggggtactactttcatccccagtcagcctgggctttctgtaacctggagactagaacagatgagtcattaaagcatcagtgatgggagcctgcctttccctcagggcactatttttcagcaataagtaaaaactttgtcagccaga

SEQ ID NO: 481684 - DNA, 1000 bp, Homo Sapiens
tttttttttttttttttttttttttttttttttttttttttttttttttttttttttttttttttttttttgccgagtgagggctgtgcccacaaaaacgtttattactcactacgacagtaagcacaatgcatatgactgggaagagtcccacccagaggaacaaaggtgaggcagacagtgatactcactgcagagaactaaagaaaacgctcacttgtagcttacacacattaattttaaagaactgacgggaggccccgcatcggcgcctacacttccgatacttctgagttcatacaccgcagagacgagagggccgtgagatggaattctgagtgtgttcagacgaagagggcatagcttaaggcggggggatgtcattattggacttcagaatcagtttgtccccactcttctcaacctcaaagcccatcttcttcagtagggacgcatctgccaacccctgctcctccatcttggcaatgaaatcttggttttggctgttgtcttcagtgagatttcgcacggcatacaccacccactgcatcataaaggggttgttgtcatcgatgttgctgctgtccaggatcagaggaatgccatccagctcattcactttgtcttggttttctttattcttgtagcacagatttccaatcagacggatgaggtgagacttaaacccttcagtcatgtgttcgatatcaccctctgcttttagagagtcggagggactgaagatgttcgtgctatcttttccaactgaatgaatcactcgtaaaacatcaatcacgcgttccatcaggccaggaaaaacctgcaggtagccgagcagctcagtgttggacgtcatttcacacaagacatccaggagccgaatcgtaaccagtgcttccttgtcctccgtctgaggttctgaggtcaacttcagcacattccgacactgatccacgaatgagtttgcaatcaactcagcatggcgcaaaaatatagagat

SEQ ID NO: 481685 - DNA, 709 bp, Homo Sapiens
ccccatcctctcagccagagatctgggttcaggaccagcctgcagcacacagcatggagttgtgggaatcttttgtgatggtgtcttcgatgctttctctttactgcactttctttaatcctaattccaaaagagacctgccctctatgcagttaaaacgatacagccacccaggctgggggtgggcggccggggagcgagaggagcttcctgggaagaaaattcttgcttgctcaggctggagccagctgatgcgctcacctagagagccctcctctttcccttctcttcccttcctcctattctgggaggaagagacaaggctccacgaaagaaatgaaacccaagctgtcagggctacgggtggaaggagaatgaggaggcaaccaaaataagatcaaaaagtcaggtggcttcactccactagtggtaattccttgggtcagagaggacccccttctctcactctccctgggtctgcccgtctcctctgggtgttgagccaacagccttagcacagtcggttcctgcctctgacgtgaaagagaggaggaagcctgggactgctttgctgtctctctctctctctctctctctctctctctctctctctcacgcgctctctcttttcccctcttgctgaaatttcagcagcatgatttttttaagcctccgttttttccatccccctacaagcagccccctagtg

SEQ ID NO: 481686 - DNA, 1000 bp, Homo Sapiens; identical to SEQ ID NO: 308476

SEQ ID NO: 481687 - DNA, 1000 bp, Homo Sapiens
gatctagggtccaatggccatgccccagctatgctgtagggatgtttatgactttggcaagttaatttacttcattgtgtctccatttcttatatgatatggctgcattgaattatgtctaaaattttatctggttcagaataactattatttcataattctacctaaacaaataattattccagtagtgtatgcacattttattttgaattgtgtactcataaatgcatgagaattgacttgacaaatattgagtttctactcaactggggctctatgtgtgcagtggccaacaagaggtgtggactatttttctttactgaggtagactctttgaggtatgagcaaattaattttttcctaatctttatctttagccctagaggaataaatatcctatctatctatctataaagatatatccttcttcatatatatacatacatatatgtatatatagagagagatatgcttcatttatacacacacacacacacaagcatacacacccacccacccacccacccacacacacacatatatatatagagagagagagggagagagggttccaggtatttttttttcttatcacttttatgttttcatgtttaaaaaagtgtgcatgatccagacttttcattttaatgcttaaaaaagtctaggttgatctaaattaaaattatagtttctcttccaatgtaaagcgtatctttcccacactctccccagctctacatctgatcctcaccttcccttgtctccccttttcccactcactacctactgctaatagatggtgtgatggtcgagaaaagcttctcagagaagggttaattacagctgaatattccagaaagagggagcagcatgagaaattactttttaagttcataaactgaaagccaacaggcgccatccagaatacagatatgttttctctgatcctgccatgctttaaaacatttgtacctaattgtcaatgtttataaagttggat

SEQ ID NO: 481688 - DNA, 79 bp, Homo Sapiens
gtccagggatgccgagctgagccctggtccatgaaagcacccagaaatgagctccatcaaccaaacacaacttttacca

SEQ ID NO: 481689 - DNA, 1000 bp, Homo Sapiens
gatctgcccgcctgggcctctcaaggtgctggggaggaaatgtttattgaataaattattgaggcttaaatgatgagtataattttcagaggtgggaaggggttttctgggaaagaatagtcccttctggaagtttgcagtcagaataggcagtagatctaatgtccacatcgtgaaggtaagagttttgtagggagtacatttgaaagaagcatcataaagtcatgtagggaaaacctaaatgctcactgatggatgagtggataaacaaaatgtgacatatatatgtgtgtgtgtgtagatacacgtatgtctacacacacacacacaatcatacgtgtgtatacacatatacgcagtggaattttatccagccttaaaaaagaagaaaagcctgccatttgcaacaatgttagatgaacctggaggatactatgctaagtgaaataagccagacacagaaagacaaatactgtatgatctcacttatatgtggaatagaaaatagtcagactgaaagaagcagagagtagcatggtggttgacaggggctaggaggaggagaggaatggggagacagggcaaaagatgcgaagtttcagttatgcaagataagttcttgacccctaatgtacagcatggtgaatatagttagcaacacctattatatacttgaaattttctaagagcgtagatcttaagtgttctcaccacaggaataaaaaagagaaaatattaaatatgttaggtgatggatatgttaattagctaaattgcggtgatcatttcaaaacgtatatctatatcaagatgtcaagttttacaccttgaatatatgcagtttttatttgacaattatacttcaacaagctgttcttaaaaagcagattaaaacttctaaaaattatataaagcggggcaggagacatctagaaagggcagactggacctaaggtttgtttacctcaattttccttgttaggactttatttaccttcaa

SEQ ID NO: 481690 - DNA, 1000 bp, Homo Sapiens
catgtcgacactggcggcctgcaaagccccccgccccgccccagcccggcgctgtcagcgcggagcagccggcgggcgctggcccgaacagccctcccggggcgcggccgcggtgcacccggctgcgctgctctcccgtcccggctccccagcccgagaccccggccctcccggcgggctcctccccctgtcagccggaggacggcgaggggctgggagccgggcccaaccctcggccgcccgcggggccctgcccggcgcccgccccttgggggccgggtctccccctaactcaccctccctcctcctcgccgggcggggtctgctctgagcctgcgccgccgccgccgctgaggcagccgccagggggcggagccaacgtgctcccggccacgccccgaacgccgctgatttgttttcttacaaactcgctactgtgtagcggcaccgcgttgcccggcgcgcgaccttacggcgttccgcccacagggcctgcataaccagtggctgcgcgtcgccggggaaacttcgggctcggcgtgaaacgcgtcgctcctgattggtcagagtgtggcaaccggtggaccgccggcaatggcggggttttcggttttcaaatgaacccggcaggcgggaaagaaggctggtttaactgacccagggagaaaggtcaggggcagggtcgcgcgggctgctctgggacctcggcgcctcctgagggaagggaggcagggctggagccacccaatccgaggttccactactaatagaacattcattggcccttactacgagctgggcgctttatttcattcatttattcattcactgtgtgcagggagcgtcctgggagctggacgcgcacattcaaacaaccaaataatattagatagtgtcaagcaccgtgaagaaagggaaacggagagacggagtggatgaggaagggatcaccctgccgggctcagactgagccagcaggaaaggagcctgcagctgccac

SEQ ID NO: 481691 - DNA, 1000 bp, Homo Sapiens
aaatatatgtacatataaactggcagagggccatgagcactgtacccaaggccagaatctacccggcagtctgcactggggagatgagaagttggggcaggatgaccagcggcggagggagcctccttaatcctctttccacgcggggtcaggcagggaagcctggggtgcagcgcctctcgggggacggcatcttacagaaggaggtgcaatgggggacaggagcacaaagttcaggaaaggataaaaggccgggtgcggggtggagcgtccgcttcggacaatctgcttaaaagtcgcttcacaaactctgcaagtttgggatcaatatttacaccctctctgccttctcccgcccgttttcccgctgctactcaagaaagtaactgtcccctgctgctctgtgtaaacgcggcaccttaaatgattattgcatggaccacggttactttgtgtgtctgtgcgcgctgcccctggaaaggaaaagaaataagagaatcccaaatcatatacagatggtacaactttcacttttcctctatgacgacgaaggcgcgcctctctccatccgctcacaccacacccccgccctccgaagcatagcccgggctggagaagccccagcggcggcggccaccgcggcggaggtccccgcgcgcacccaccatgcctcccgcctccttccgcccatcccgagcgccgtgcgcgcccgaagcccgagccgtagagcgccaccgcgcaaaggaaggagccaggcgcgtgcggggctcgcggagttcttctgaaccctttggatgggggcggaggcgaggggcgccgccaccactgcggcaaacttcgtcccccctccgggaggtgaaattctccaatccgtctccggccggtcggcgggtcggactcttcggaaaggaccttccaggaggagggagcgaatgcaagccttgctcggacgcctcaccggcggctctctaaatctgggcgccttttgacagccattttc

SEQ ID NO: 481692 - DNA, 1000 bp, Homo Sapiens; identical to SEQ ID NO: 308478

SEQ ID NO: 481693 - DNA, 1000 bp, Homo Sapiens
cgagaattaatgtgaattgcaggacacattagataaaaacagtattgttcagtctataaactgacactaaaaatcatactgtacacaactgatgatacactgtacaaagaactaaggctgaaggatgggagccattcatgtcttttttccaaatttgtgttagtatggatggcagtattatatacttttcagtacttactgaaactaacgttattaaggctacttgcaggattccttttgaatataaattaatataaatttagagtagaaaacagactagaattttcaagtatttgtcctaattataggtattttcttcactttcctcagtaattgctgggcctattatgagccaagcacaatttctacatggtagagatagagtggtgaaaaacacctccttacatagaggttacattttagttgacatccattttttctgtcaatcatacttttgttaaaggaaggcctctctcctgtgcagactccgacaagacttttctgctgtgttacatcttgagaaccgggacacctggtactctgatataagcactgatcatatttacagaacaaagttttctcgcatctgtgaaatatgacgtttgtaaagaattcatgtcctaaccaagtctaaaacacagcatttggagagacttctttcctgtcaagattcttcgaagctctagttttaaaggaacttttcacaatcatcagcatggacttcccaacggagacaaagatgtgagctctaactgaaggctgaaccacacctctcatttctacagattccctccagtgtggactctctgatggtagatgagatgtgacctctgactgaagcccttacaacagacatcacatatgtaaggcctctctccagtgtggactctctggtgtgtgtgaaaatgtgaggcctgactgaagcccttcccacactgctgacacgtatagggtttctctcctgtgtggaccctctgatgggcactgagaccagcactcc

SEQ ID NO: 481694 - DNA, 648 bp, Homo Sapiens
aatgaatggggaaccagtctctagaagagagaaggctaaatatgaaatgagaaatgaggacaaaatatctcagactgtgtcatagggaatcctgtcataaaaacactttaagctagtaggcaaaaagcagaaaacatctccatagccactgctttccttctgtcctccaccaaaagaatttcaaataatctcttaaaagaaagttttttttctccccatagtatgaaaacctggtaacatatttgctgtcaccctccaccattacctaaggcaacaggtttgtgtgggggtaatctgggaggtggtggtctaggtggaacttgggatggctttgctgggctccctgacatgggacatctcttgattgttccttgattttcatcctcagtagaatgcatttcctgtggtatgaagatagacttaggctgaaataatatagaaaaagagaccaacaatgaaacatcaaattattttcctgaagtaagtactattatacattaaaagctttcaaattatttctactatacattagaggtttaccagatgagtttaaaggttactcaaccatccaattcagactatcttattgttttaaatatattctaaaaatgtacactaaaatgtgtacatctcaggttttgctgctgt

SEQ ID NO: 481695 - DNA, 744 bp, Homo Sapiens
caggctctgtatgtgagacactatttccagctccccaccgccatacccttgaattatttctctagtctcttataaaacttttactaggccaattaagttgcttacaactgggcagatttttacaaccctgccacattatctaaaatcactaaattaacttgaaaattaactgaaaaaaatgtttctttaaagaacagtaaggttgacaagcttttatagtaagaataagatagtctgacttttatgcttaccttaattaacataaatttctgcattggttcaacccattctaatagaacaatgctagtctgaagtgctccacataggtatttatggcccgtgtaaggatttcttactgtcaaagcaaaaatataaatgagttctcttataaaacaaagtcattatgacaataattgcatgctcaaaaaaacaaacaaaactaaacaaactaaacataaaacaaaatcaaaagctggttgccagttcagtttcttaattagagggctgggtgaaaaaaatactgtttcaggtaatagcaggaaatgccctcttaacttgcaggatttttatttgtatgcacaaatgaaactgctggttataatgaggctgtggggtaagaggaaggacttttcgtcttatgatggtaggaaaattacctgaggtggcaacattctgataaaagggtcaaagtaaatttgggaagaagttgtcagactcctaagatacaacacattcgggtggttc

SEQ ID NO: 481696 - DNA, 1000 bp, Homo Sapiens
agtacaaaatttttaatatacatgcaacaagtatagtacgcatcaaggcaacagaatacacatggaaatattggcgtataattcagcattcttttggaggcaagagggagggtgaacaataaacactaccacctaaaattaaagattgagacatacatggtttcctcatgcaaacagtaacaaactacctttagtgtgaaacgaactctgtagaaacctgattttataacagcagatgaattttataccaagatctccaagaaaggaggaaaagtcatgatcctcagatgtaatgtttaaatctgcatttagcagcatgtgaagatgcacaaattacacattagacaaatctgaaaaattttacgattatggaatcttgaatttccttctacattataaaaatgtatgtaaaaccattgtttaattactaaaggataataaatgttggttgagagtggaccatgaatgataaagcatttaaacattctgatagttcataggaaagcagcaatagtgctcaagtccagcctaaaattttcaaatttctctttatccatttcctcactcccttctcccaaagtttccattgtcctcatattatacctaccttccatcccccatgctgatgaaaacctgctttggatacttcactcataatcaggtatgtagaattgagaaattgagaacaaaaaatgtatcatttctcaagaatatttgcatttctacaagtattgaagccttaagcttaaaggaataaagctctgaatatgttctggcacatctaagataacttattttaagggcttccaggcctttgtccctgaagtgacactgtttgactgtcttacataaaagacttgccttgttactacttattatcttaaattccaaattatgagactaagctctaaatattgcagaaaaccaccacactcctacatttctaacacaaagaatgaatgtggtaacctcagctcttttctcaataataataaacaaa

SEQ ID NO: 481697 - DNA, 1000 bp, Homo Sapiens; identical to SEQ ID NO: 308480

SEQ ID NO: 481698 - DNA, 1000 bp, Homo Sapiens; identical to SEQ ID NO: 308482

SEQ ID NO: 481699 - DNA, 1000 bp, Homo Sapiens
aatttctgctttctacatatggctagccagttttcccagtaccatttgttaaataaggaatcctttccccatttcttgtttttgtcaggtttgtcaaagatcagatagttgtagatgtgtggcattatttctgagggctctgttctgttccattggtctatatctctgttttggtaccagtaccatgctgttttggttactgtacccttgtagtatagtttgaaatcaggtagcatgatgcctccagctttgttcttttggcttaggattgacttggcaatgcaggttcttttttggttccatatgaactttaaagtagtttttttccaattctgtgaagaaagtaattggtatcttgatggggatggcattgaatctataaattaccttggacagtatggccattttctcaatactggttcttcctatccatgagcatagaatgttcttccatttgtttgtgtcctcttttatttcgttgagcagtggtttgtagttctccttgaagaggtccttcacatcccttataagttagattcctaggtattttattctctttgaagcaattgtgaatgggagttcactcatgagtttgctctctgttgtctgttattggtgtataagtgtgcttggtccttcttgtgatcaaccccatcctgaagctacctagactcttagaggctgctagacaccagtcaatcattagcatacaaaaagacatcactttggagtttctaaggattttaggagttgcgtgccaggaaatggggttgaaaaccaaatgcatatttcacagtatcacaaatagccaactattttctaatttcatcctttttgtaatcctttctctgtttttctgtagaatgatccatgttcctcagtttcatactaggctgttcccgaattagaaaaatgaagtagttttctagggatggtgtttcttagtcattcacaaagtgtgtcttagtcattcacaaagtaactttgtcatgtattggca

SEQ ID NO: 481700 - DNA, 1000 bp, Homo Sapiens; identical to SEQ ID NO: 308483

SEQ ID NO: 481701 - DNA, 1000 bp, Homo Sapiens
tttttttttttttttttttttttttttttttaaatcaactataatttattcaattaagcataaatttactttcacatttgtctacaaccacagtaaatacagttcttggaataaggacaaagactttagaatttaaaacctcaccacctgcaagattacatatataaaactcccactactgtttagataatagtggattaatcaaattaaaatagttaacactatctagaataaaataaaatggaaataatttactcataagattcctatttaaatcatccttatttacaaaatactatcctgagaattataattttattgtttcaatttgagcaaaagtgtaatcactgaagtaacagcagatacttcaactgaaaatgagaatagcaaaatgacttttgaagacagcaaaaatattatcaggtttcttgctgtggttctggatcttcatcagcaggctcatttgaaggcactcaaccctaaagggaactcactctatcttcagaatgtgggggtgggggtgggggcaaaatccaggtcttgggggaaggtaaggaggaaaacccctcggtggacagacatttctcattgcaaatggagcacgtggtggacctgggacatcccttggtggaaaataatctggagaagctccaaacatggttcctggaggaggtggagggaaaggaggtcctcttctcatgaacgggcccctcgtatccactggaaacaacggacctctgattggagcaagaggtggaggaacaaagccagggccactcacttcatttccagcagggagagatgaatcagccacatttaaattaccaagattatctttggtatcatttccactggattccatttctgaaggcattgacccatccattttatccaaaggaggcttattaaaacttctgagttctgctagtccagagcgtctagcagaattagaataaaatctgtcttgcctttgtggaggaagagctgaatcaggatatga

SEQ ID NO: 481702 - DNA, 1000 bp, Homo Sapiens
caggtagtcagtgggctatgccctgagaaacatcgggccttgaacaagagtgtttttcgtacactggaatgggttgagcccccaaataagatatgttcaagtatctaatccctagtggctgtgatatgaccttatttggaaatacagtgtttgcagatataattaagttaaacatctcaagatgagattatcctggatttagggtaagccccaaatccaatgactagtatctttataagataaaggagagatcaaatcgcttgagcccgggaggcagaggttgcagtgacccgaaattacgccattgcacttcagtctaggagactggagtgaaaccctgcctcaaaaaaaaaaaaaaaaaaaagagattgaagacatagagacacagtggagaaggccatgtgaggatggaggcagagatttgtgggacgctgctataaagttatggaatgcctggagccaccagacgctggaagaggcaagagaggaccctcccgtagagcatcagagcgagtgtggccctgctgacatcttgattccaaacttctggcttccagaactataagaagattaatttctgttgttttaagccaccacatttgtggcaattagtcataatagccacaggaaattaacacagacacatactcctgctgggcctgagaagcgcatcgtgcattctgggtggcctgatccacttcacacaggtcgtgcataagcggaatcacctattcactgaataaggacatttcgccacaggtcattttctaaacaacagaattctgtaatgtgatcaacttcttcaacttcctatgttttagaaagttatattttctgaaatacctcctataacctgtaatttccttctcttttgtgtgtctgctggaaaataacttgtccacttactcatcagacctcaacaatttatttatttatttaagttgtttttaaagacagagctttgctctgttgcccaggctggagtgaagtggcatgaccc

SEQ ID NO: 481703 - DNA, 1000 bp, Homo Sapiens
gcttacctttcggactccaaagccgtgttctgctgcaacttggcgagctttgtcctctccccctttatgcaactccacaagaaaatgattcgtgaagaccggtcgctcagcagatgcaaaaaccatgacacagaagaggaacccggcggccgccttccactgggagacacaaccacccttcatccttctttgggagtgaaaagtggtgctaggaggcgcgcaggctggcggagcaggggactcggagggagggtgcaaataaagaattcttatatatagtttttaaaaaaatctttgtatagagaaagagactgaacagggtcttggaaagcagcgaatcagtgtgtgttctccagcatctggctggaggggaagccgtgcagtcaggcggcccggcgcgcgggcaggggtgcgaatgtggggagctgtgtgtaccggagagaaagagcgagtgtaggtctgtgcttgatgctaaatctgcattttcagctcctcctcagctccaattccctaggggctgggggagagcaccagctcgggtgacgtgagtccgccagcggccaatgagggcgggggaagcggcgggccccgccctgggccgccccgggcccgcccccgcccacccccggcccggcccggcccggccgcctccgccttctgggggcgcacggcagcgcagcgcagcgcagcgagcccgcgcccccgcccctttcagcaccggagagctcccccatctcagcctggcccgccgcgcgcccaggaaaatccccccagctgtaatcaggccagcggcggcggagtgatgcattgtttgtgggaatctgtaggctctgggaagggaattacggtgtgtgccgctctcagaggccccgagggagcaggggcgccggcctctgtgcctcttcctgcttgtttcccgctgcaaaaacacctctctctctctctctctctctttctctctctctcaaacacacacacacacacccaaggcatacttgcc

SEQ ID NO: 481704 - DNA, 1000 bp, Homo Sapiens
gatcacccaagcccagggggtcgaggctgcagtgagccgggattgcaccactgcacttcagcctgggcgacagagcgagactccagctcataaataaataaataaataaagttctggttgtaaatcctggggcactgctgggggaggtctgggggtctcagagggtatatgtttgtgaaactttgttgtgatagccagcatcctcctttgtccccaaggagacaatctcacctagtatatgccaggtacaatggcacaaactgcggataaaccacgttcccaacctcatgaaaatgtagccgagaagatcatttccaagagtgagaagtgtctgaaagaaatacctgggtgtaggtatttttgcccatgggttgggaaaggtctcctgaggtgttgacatttaagccaagtcctgggtcacagaagggtattttatgtaaatatgaaggaaggggctgggcgcaatggctcacacccataatcccagcacttgggaggcaaaggtgggtggatcacttgaggtcaggagttcaagaccagcatgaccagcatggggaaaccccatctctggcctgggagccctacagaccggggccaaccttgactcgcctcatgggtccccactgcctgggccagggcttggcaggcaggtagatgctgcacttgaccttgaacgtggatgcgcttctacagcaatgccctgtgttccagacgggaagccgagtctccccttgtgcccggagagatgtggggacccagctttttggccttctgatcaggcccctctgcaggtctcaggcctgtgggctggcaggggccccagggcctgttttttccgcctggtgttgggattgacgtcttgaaggggcaacgccttggtgctggtgattatttttttaacctttgcagattcagccagagactcgaaatcaaagccgttctgccccccagccccagccgggccacagccagcgaggccacatggaggcctgacctgttg

SEQ ID NO: 481705 - DNA, 1000 bp, Homo Sapiens
cgtgcttcatgtctgttaaactttgtccacttgagcaagtttctcccatttacttccggttttccttccagggagtatcagtaattcttctgctccttcttcctgagttatctgatttattctaccctccaaatcctgatgatgactctttggtttacacctttagccccattcattacaaggataaagcagatgcacttgctacgtaactcagcatctttccccacaagccctcttgctagattctttcttactacccagaccaggaatgtggactctcctctttgcctcacccaaccgcatcctcctcatccaatctatcaccaagtcctaatgatatagcaactaactatctctgtaatgcatattctcatttctgaccttctactacttctaagggctggaattaaagtgcaagtccctatcgtcttttgtcttcacctttgcaatagtctcttaagtcttcctgcctccaatatggacctctccaatctgccctggctgacttttggaaaacaccaatctgaccatgacactctcctattaagtacttttaccagttcctcctcctcacctatgacagctgtttccgacataaaattcctgagggaaaaagacatttccataaatagatctccatcagcagcagaccagatttcttagggaatacttggaaacaagacaagctgtggtccatacccaattcctactccactagcagtaagacaaggggtttcccttccactggaccagtacatagtaggtctaataatagatatgaaaaccccatctgagaacttgtgacccagaagccaaagtccagactccatagaatgccaacaaggcccttcttgattggatctggatatcttttccgcatcatttcttgtcactaattccatgcttcttcagatgcttaactacttcatgaaatttcactcttctatgtccttatctatatgattccctctgccttgaagatcctcgtctgcctgaaaaa

SEQ ID NO: 481706 - DNA, 1000 bp, Homo Sapiens
gatcctgtcagggcagcatctgaccattccactgcccagtggaattaaattttttgaaaaattaaattaaaaaaaaagaggccaggtgccatggctcatgcctgtaatcctagcactttgggaggccaaggcaggtggatcacctgaggtcaggagttcgagaccagcctggccaacatggtgaaaccccatctctactaaaaatacaaaaaattagctgggtatggtggcaggaacctgtaatcccagctactcgggaggctgaggcaggagaatcccttgaatgccgaaggcggaggttgcagtgagctgagatcgcgcctccagcctgggtgacagagtgagactccatctcataaaaaaaaaaaagaatgaaatgcttcattttttgcacaggggctgtgctaatcttctctatattgttctaattatagcatatgtgctgctgaagcgagcactactttactttttttattagaacaatcgtttcttgtctgtatctttccctagagcactggtgttccatatggcagccacatatagatattcacgcttaaatcaattaaagtgaaataaaagtaaaaacgtcgtccctcagttgtcctagccatttttcaaattagcgtggatagagaacatttccatccctgggaaagttctagaatgttgctctaggacgtcagttttcagaggagaggggatttggtttcaacatatggtctgggacagaataggcactcagtaattgcttgctaacggaatgaaggtagcagctggccctcctgcggtagctgaggcctgtccctggggtggccccatggatggcaaacgggcttgtggatggcagggcctgtggctggacgacggccctgcacgtgtgtgcacacgcacaaggctgccaggcggcgggacacatgagccccgccaggtgccccgcgctgctgacacctgcccacggactggcggtgactcagtcactcgctggtactgcatttatttt

SEQ ID NO: 481707 - DNA, 1000 bp, Homo Sapiens
aagaggaaaacccggtaatgatgtcggggttgagggataggaggagaatgggggataggtgtatgaacatgagggtgttttctcgtgtgaatgagggttttatgttgttaatgtggtgggtgagtgagccccattgtgttgtggtaaatatgtagagggagtatagggctgtgactagtatgttgagtcctgtaagtaggagagtgatatttgatcaggagaacgtggttactagcacagagagttctcccagtaggttaatagtggggggtaaggcgaggttagcgaggcttgctagaagtcatcaaaaagctattagtgggagtagagtttgaagtccttgagagaggattatgatgtgactgtgagtgcgtttgtagtttgagtttgctaggcagaatagtaatgaggatgtaagtccgtgggcgattatgagaatgactgcgccggtgaagcttcagggggtttggatgagaatagctgttactacgagggctatgtggctgattgaagagtatgcaatgagcgattttaggtctgtttgtcgtaggcagatggagcttgttataattatgcctcatagggatagtacaaggaaggggtaggctatgtgttttgtcagggggttgagaatgagtgtgaggcgtattataccatagccgcctagttttaagagtactgcggcaagtactattgacccagcgatgggggcttcgacatgggctttagggagtcataagtggagtccgtaaagaggtatctttactataaaagctattgtgtaagctagtcatattaagttgttggctcaggagtttgatagttcttgggcagtgagagtgagtagtagaatgtttagtgagcctagggtgttgtgagtgtaaattagtgcgatgagtaggggaagggagcctactagggtgtagaataggaagtatgtgcctgcgttcaggcgttctggctggttgcctcatcgggtgatgatagccaaggtggggat

SEQ ID NO: 481708 - DNA, 1000 bp, Homo Sapiens; identical to SEQ ID NO: 308486

SEQ ID NO: 481709 - DNA, 1000 bp, Homo Sapiens; identical to SEQ ID NO: 119956

SEQ ID NO: 481710 - DNA, 1000 bp, Homo Sapiens; identical to SEQ ID NO: 308488

SEQ ID NO: 481711 - DNA, 1000 bp, Homo Sapiens
cgaacaattaattaaaaaggaggttaattcacagtttacagacttagcatctgcttgtttagcatatgcaataaaaggcgaagttgtggtagatttgcaaaaatgtcagttagataattgattatatatataggaatcattttttgcataatccaaatcctctttttcttttgatgatcctaagatatcattttagaacggaatgtggtatttgtaccctatgtattttatgacttaattattctaagttgaaagaatttatatatttttttgtataccacattcgtcactggatttctggaacttttttaaaaaatcggtgaattgggccgttggtggcggctgtgatgaaggaccctgcaggcatctggctgtaattggcgcctgcggcggccagggcccctacgggtgcggcgctgaaggccgccccgtaccccggaggtgtagcgtagggacccggcgggtaggccggtgtggggtgaggctccgtgcccttgctggccagccggctgaggatgctgcgctcggacatctgaaggcgggctgcgatggggggtattcgggacagcgtggctggcaggcgggtcacgtccgccttcatgtcgctcagcaactcctccagctggttcagaaccttgtgcaggacggcgttggccggcttgttccccgccagcgactccttggagaggtgctggtggctctcggccaggcactcggcctcggcgaagcgggcgtggagggccatggcggggtgcgccggctcctgcgacaggttcaggtaggccgcccgccgcagctgctcctcaatcaccagcgcctgctccaggagcttgaacctccgggccaggaacttatttttcatctccagaaagttccccttattggcttcagttttaaatggctcgttgataatggcaaattgagcatcattctggatgtcctgccaccgtgcatagccatggaggacaatcccagccagaagccaatagtcatgtcttct

SEQ ID NO: 481712 - DNA, 1000 bp, Homo Sapiens; identical to SEQ ID NO: 308490

SEQ ID NO: 481713 - DNA, 1000 bp, Homo Sapiens
  misc_feature (380)..(380): n is a, c, g, or t
gtacatcagcatctggtgatcttggttaatgtgaatcactccccctagacctgaccactcctgcacaaactaataaacctacaaagctaaaatccaggccctgtcctcgtggtgatcttcccactgggagaaacctgttccttgaagacttttgttactttctgtcagttggacctccctctcctgcttactccagcttttgtgtgttggtgtctgagtcctgtgtgggagcaggggcaatattcaaaatatttaacaacctgttcgccatggagatgcatactggtaagcttggaggagaaacagggaggctcctgatgggcagtattaaccctttcgttgctggagtgtttagttgctgggaggttgggaggtcctgngtaaggagaatgaaagcgcctggggagctcagggctgtagggtggaaacattttaacaaccggtgcagctgaatgtcagtcagtactcatctgcctctctgctgtgtgctcctcctccctggcacagaaaacatggtgggggcgtggggacatctctggctgtctgatggttatgctccagaggggaggcctcagagagcccagatgacataaggcccttgcatggccagtcctagcctggtgaccccacaaacgcctcctctgtttgcacaaatctggtttcctttgtccttatatcctgtcacaagagggggagccaaggttctaacctcaagtggctccaagcccccaccctctaggctcccaagtccaggcccctgcctctgctccctgaagggacctcagccccctgcccctctgggccccaacctttttgccttttcctttggctttgcccttttgattgctgttctttatcaccgtagctgcctcctcctcctcttcttcctccttcctcgcgcctttgggagtgcctgagcgtggagggggaaacaaggctgtgaactcctcaccctggtttgcaaagtgcttccaatacccatgtctcacttggatgctcc

SEQ ID NO: 481714 - DNA, 1000 bp, Homo Sapiens
  misc_feature (12)..(12): n is a, c, g, or t
  misc_feature (91)..(91): n is a, c, g, or t
  misc_feature (99)..(99): n is a, c, g, or t
  misc_feature (115)..(115): n is a, c, g, or t
  misc_feature (287)..(287): n is a, c, g, or t
  misc_feature (745)..(745): n is a, c, g, or t
  misc_feature (798)..(798): n is a, c, g, or t
  misc_feature (822)..(822): n is a, c, g, or t
agagatatgcantcattccttgcatgtggctagaactatgacaggtaaacctgagatctgtggacaaccatatttccctatgagaattganaaccacanatagaagggggctgtnttccctgagttcctgcccaccttctggttcccggcactggggggaactggctgcatctttgcctctgagtccttgagacactcttgggtccttctaatgatgccccttcaattttaacctagcctgatttggtttctgttacttagaactgaagagacttactaatacatcntgtacttcaagccaataacacatgaataattgtcctcaaaaattagaattgatcttccacagggggttaggagatttgggtgaaataggtattatctttaatttaagtgtgttaggggtatttcaaaatcttcattaaattttccaaatccttcctgttgtgttgccagaatctttccttaggtaagagaccaatctgaggttggttccttgggattttgttaagctgggaaatcccttcagaatgacagaagccaggctatactacagtattaaaaggccaaagactgaaacattctaaaatgtagataattaagtttctcagaagcctcctcttccactcgcctgctatcccactctgctcctcaaactcacgaattttcaaaggtatttgaagctgaaatgggcctttgagttgttacttgatattttcatgcatgtcctgagattacggcctgnagctttgctttgagaataatagtcagaaacagctatttgattgtgtctttagnactcctaagtaagttaacaggggnagttaatgtcggtatgaaacagtttagctaaaatgtatcgccatatccttattgaagaccatttactactcattcagaaatatgttacaaagagagtatattgtcaatgaatcccactcatgaattgattggaaaatataatttattcctagataaaaagggagctctgattgtatga

SEQ ID NO: 481715 - DNA, 1000 bp, Homo Sapiens; identical to SEQ ID NO: 308491

SEQ ID NO: 481716 - DNA, 1000 bp, Homo Sapiens
  misc_feature (263)..(263): n is a, c, g, or t
ggaggcaggttctaaagagatgatgtaaacatgaagtgtgggtggacctaatccaatatgactggtgtcttcttaagatagagtggcagggcaacgcaacatataaaggaaaggccacgtgaggacacagcaacaagtggccatctacaagccaaggagtggcctaagaaaccaaccctgctgaaaattgatcgtggaccataagcatccagaattgtgaggaaattaattttattgtttaagccagccggtttgtggttttntgtcatggcagcctgagcacattaatacaggggtaggggtggaacttctactctctgcctggctggacaaagccccttatgggactgatcttactcagtctaatgcccatgagtctcaaatatcatcacagatgaggacactaagaatcaggtggctaagtaactgcccaggttgcagagcggtattcaacaaattctaatgctggtgggtcttcatggcatcacagtgtgaccagagtactaataacaagaatgggagtggttaaagctaaatggttctggagtttctgcctctgcatggatgcctggctccccacagaacagcaattccagtttcctacagaccctccttcatgcccagcctctgcactcatggttgcatgaagctttcatttggaacagaagcaacagttaaggtattagctcctaagaaaagcaagttgagtgtaggccctggaattcagactgatttttgaaagcttatgatgtggccactgtccaagcactttccatggatgatgatatctaatccctacaacaagtgaaggaagttcattatgacctccttttcagacatgaagaaacagaacagttaggtaatctgcccaaggaaagtgtggagatcaagcaaatcctgaatgcacagaaatattacagatccacgcagacacacggatacagacatctctggggctgagtgaggtgggggaacaaagacagacatgccccaaggaaag

SEQ ID NO: 481717 - DNA, 1000 bp, Homo Sapiens; identical to SEQ ID NO: 308493

SEQ ID NO: 481718 - DNA, 1000 bp, Homo Sapiens
attttattaaatttattgttcattgtaaagcaaatcaattacacagtaacatgacaattccaacttgttcacaaaaagtgataattgagttctattcttaagctctgctacattacaccacttatcacctgattaaataaagtaatgaacatttacaaaggcaccgctgtgtaccttgacagattcaatacattcaagatttcaattcagaagtttctttccaacgttttggaaaatgtactcagaagcagaacgattagtcatccttttccctcttgttactttaaagattttggctgagtttgtttggcaagaatagcatcaaacttactagcctctcttttaaactactattttttttttttaaaactaagcagaatacaaaaatctaaaaatctctcatttggataaataatttatgaaaattattcaataaacttcatagtacaatcttcagtattgtctttttcaagcacagtgatcagtgcatctcaaagatgagggaactgtcaaagtaatatacacactaaaatttaaatttttaaagaaatcaaagccttcaagttatccaatgaagaatgaggtttgtatattaaaaaggtagtgtaaaattataaagcatttaaagaaaaacaaccgaggaactacattttgctacactgggacagaaactggacttttcgaatagcttctaacccagaaaacaaacaataactaatagcagccagaattcttatactactattaaaaaaataatttaaaattttacatccagtttgagatcactttgagaataaaatacctgcctagcagctcttttgtaaaatgttactataggaaaaagaaaccaagcatattattatactttctgattcctaacaaaaaacataaaaaacacatgtccagttctttaacattgagagacttgtttgtcacaggttaataggaggcactgctggtggaagaccctaaagaataatgcacaccacagccctcagcc

SEQ ID NO: 481719 - DNA, 1000 bp, Homo Sapiens; identical to SEQ ID NO: 119957

SEQ ID NO: 481720 - DNA, 362 bp, Homo Sapiens
aaataggtaaagaggagcctttacctactctccccatgccctccttttttttttaatgttttgaagactatatttcattttatttatctttgaatatacaatggctatcactggcctggcacataatacatattcaatgaatgtttgttaattaagaatttattagacttgaaatagtcaaaagatgagagataatttgtttcatttctattcccttttctgtaaccaagatgaaggccaaagtggtcttaggaaccttttgtcttcctgatgagttcttctatggtgtcccactgctccttggtgacctaacacaaaaaagatgtcaatttaatgtcctttttacatgtttttaaagctta

SEQ ID NO: 481721 - DNA, 1000 bp, Homo Sapiens
  misc_feature (61)..(61): n is a, c, g, or t
  misc_feature (434)..(434): n is a, c, g, or t
atatattgcgtacaagaaacccactttgctcataaaaacaacaacatagactgactgtatngggatgaaaacagatattccatgaaaatgaaaaccagtaaagagcaggcacagctataacttagataaaatagactttaagtcaaaaagagtaaaaaagagtcaaagaagaccattatataatgacaaatgggtcacttcagcacatataatatagtatttataagtatacatatgcacccaatattacagcactcagatatattaagtaaatattaatagatctgaagggagaaatagatgaatacaataagggcaggggaattcaacaacacattttaagcaatggacagatcattcaggcagaaaatcataaaagaaacatcagagtaaaactataatatagacctaacgaacctaactaaatgtacagnacatttcatccaactgctgcaaaatacacattcttcttatcagcacatggaacattcatcaggacagaccatatgctaggtgataagtctcaaaacatttccaaaagtcaatattatatcaagtaaattttctgacaacaatggaataaaactagaaattgataacgaggaactttggaaactgcacagatacatgaaaattaaacaacatgcctttgaacaaataaacaaattcagtaaagtttcaggatcaaaaatctgcatacaaaaatcagtagtgtttctatacaccaataacaaactggatgaaaaagaaatcaagaagtcaattccatttgtaatacctacaaataataaaataccctggaataaatttaatcacacaagtgaagacttctacaatggaaaactgtaaaatactggatgaatgaaaccaaagaggatgcaaaaaaatggaaagacatctcatgttcatagacagaaagaatattgttaaagtaatcatatgactcaaagcaatctacagattcagtgcaattcctaacacgataccagtaacattctct

SEQ ID NO: 481722 - DNA, 1000 bp, Homo Sapiens; identical to SEQ ID NO: 308495

SEQ ID NO: 481723 - DNA, 993 bp, Homo Sapiens
ctttttctgggtcctgttctctgtttgggccaccacctgctgtgtgaccatgggcaagacctttaccctctctgggcctcagtctcatcttttgtaaaagcacactagagtttgtagcactgccagagtccctggaccccacccctggagggttcagctgggtctggggccctggagagtgcatctctaacagctccctgacccctgggcgttctgaaaggcgatttgcttcaaactgagagaaaagtcaggctagagatctcaaaggcttcatctggatccagctctgatgttctgtgattcaagcgtgagaggcagaacttctcgttcctctgtgtctccgtggcctgttgagcttcctttctccacaggagcaggtggctgcagaaggcgatcaggcctgcggctgacagaaggctcagcagcaccaggactggggccagtatgcggaccatcgggatggacaccctgggcttagagctgccactgctgagagctggactggtgtcctctgctgaggtggagtccagctgcatgggggggcgggagctccctggaaagacgaacagagagatcagtaaagactcatcgggggcccgtttctcgaccccacaccagtactccccagcgtcttgcagggtgaggttccacagggtcacaatgagcgagagctcctggcggctgtcacggatggacaacctgcccttcattgtctcctggccttcttcttctgcatagatgtggccagagcagcgagagaagaggatcccacccttcctgcaccagtacttccggtgtcccctcagctcttccctgtaggtgcactgcagggacacagtgtccccttcgaacccgctgatttcctctggcccctccagggcttcataacctgggagcagcagccaaccccatagcaggaccagaagccgcattctgggcgctggacaccgtgggagcagacgctgggaactgtgagctcctcttcagtcacac

SEQ ID NO: 481724 - DNA, 1000 bp, Homo Sapiens; identical to SEQ ID NO: 308497

SEQ ID NO: 481725 - DNA, 1000 bp, Homo Sapiens
aaatattaacgcacactttttttttattatattaaaatcaggcaatggtctgacaataaaaaggctgcttatggaatactgttatgttaaacttcacttacaggatgttaaatccttagaactaaggttttccccccagaaaaagattaatggaaacatcaattgcttttcagacttgatagttgctgcttcaaaaggtggttttacacaaatactaaattaaaaaaaaaaaaaaaacctttagtacacaatgaattgcttttatttcggtatgcatccacatttcagcatttagtggtcctgaacagcaagtggaaagacgcagcaatttgccaggaggtcaagcccaccaatttcggggatctgctgtgcacaccgggttccttcttaatccctgctgaggatcttgggaagcagcagcagcaccaaaaccaaggcatgcaccggattcaaggttctttttgttccagttgtcagattccaaactagaccccaatggattgcaaggatgaccaaatgaaagccctgtttaaaacttcttcaatttttaaaagcaaaagcagttacaggaaagtaaaacaattcagagggatcatgtgtgcttacaagtatcttcatgcggtctttctccaagttcaaccaccaaggactccgagagctggcaggtctgagtaaccctggtgactattcttttcaccttatcaaaacctgagctaaaaacaatgcatcagctgatgacagcagagggtggcagggctgaggacccaatattcatttcccaggctggtggagagtgagtgagtatggttccaaaactaaacaagggaggtcagaggctctttccaaccttacctgatggcttctggccaaagcaaggaagtgtcatggaaggtgttgggtggtgacggtgcaaaaaggaacttgaggaggagggagaaaaagcagcacccctcgataaaggtggggggagagaagatatggggaaagccctgaattcctc

SEQ ID NO: 481726 - DNA, 1000 bp, Homo Sapiens; identical to SEQ ID NO: 308498

SEQ ID NO: 481727 - DNA, 1000 bp, Homo Sapiens; identical to SEQ ID NO: 308499

SEQ ID NO: 481728 - DNA, 1000 bp, Homo Sapiens; identical to SEQ ID NO: 308500

SEQ ID NO: 481729 - DNA, 1000 bp, Homo Sapiens
ggaccccggcctcacctggactcaaagtcttgcgtgcgggccactgagccacctagggagttcagggccctaactcagaggtccaaagtcagggtctctaagtcagattccagtcccactcccagcccatcgccaagaactggaagagagacaggaggagtgtcacaggggaactttattgagaggaaacatggtcacacccagcagacatgctttccctcagtctcggtcttgcactggcgcgcgcgcacacacacacacacacacacacacacacacccatctccagcccctgccactgtccagttctcagccacaaggcgggacactcctcaattcctacgatcagaggcagcaggggcaggagggaggcaagaggaggggagaagtagcctggtcctggggtcgggaggaagcgggtgcggagagcaggggtgggggcatgaccagtggttaggtgcgctcaacagctgcaagaagagtgggatccccagccccaggtggcctcagctctgccagtccctctccacggagccctttggagcaagaacagcgcctaggggagaagggtggggcctcccaccccatactagtcctctcggcagggtgggggactggagggggcagggcggggcggtggcgggcaacactcagctctggggctcctggggagcctcgcccccctcttccccggcgttgtcggccgtccacagtgtcaggttgtctcgcagcagctgcatgatgagggtgctgtctttgtaggagtcctcgctgagggtgtgcagatcagccatggcctcgtcgaaagtggtcttggccagagagatggcctcctcggggctgttggcgatctcgtagtggaagacggaaaagttcagggccaggcccaggcggatggggttggtgggcggcatctccttcttgctgatgtccatggcctcctggtaggctgaccgggctgagtcaatgatgcgcttcttgtcgtcaccggtggccacct

SEQ ID NO: 481730 - DNA, 1000 bp, Homo Sapiens; identical to SEQ ID NO: 308501

SEQ ID NO: 481731 - DNA, 1000 bp, Homo Sapiens
ttttcaaaatctccaagcaaatgggacttccatgacctcaccattttggttaagaacatcagaatccggcttcttcagaagcgcatactagccagcgataatgatggatagcctctgccttttccttctaaaacacgacctccttaagaagtatgtctcagcttcttcataatctcaaaaagggagaaacctgactggggggaggtggttgatacatgaaaaactttattccctccgtcacagactagataaaaattaattttgtgttcactaaatttagatgtgccgacacttccctttacttttctagaatcttgcatctcttccacacagctagatttctggctctggtaaggttagtcctatgagaccctttaatggtatctattcctggcttgccatttggatgtcttaaaccattaaaaaggaaatccctgactgacttactgtagagtcgagtctttttcattttggctcatccttttactaaggttttgtggtgggttgttgaaccaggaaagcactggcactggggctgagtcttttgggtatggtgaggagctctatccacaatcctgccagaggaccagatatgtgttgtggaaaaagcacatcagagagggatggaccccaacctctttgctgctgtggccctctaagctctgggtgaaggcaggttgacagcagggctttaacaagggcattatggtttctaatctttttgcatgatccctggctgagttaattcttcaaaatgactttgtctttttaactcttacagatcaaaccctgatccctttgcttagaagatgaaagcattccaaagaaaccaagctgtaaggaacttcagatgcactcattttctcccttcctagttgaaacaccaccaaacctcattgctgaatctaggatgccagtgtaaaatacacaggttcaaagttaaagggtgccactttaaaaataagaactggcaaatgagtcttatttccaactcaaataa

SEQ ID NO: 481732 - DNA, 1000 bp, Homo Sapiens
tctctctctctctctcacacacacacacacacacacacacacacacacacacacacacacccctccaccccattagcagtaaactatctgtccccaaacagggacgattatagaagtcaacatggtagttcactagttcacattcatttgaaatcacttatataatgtgtagagagtaaagctgttctttaaatgatctatcaacttttcactaaatagttacaacttcaaaagccggggaagtgccttcaaatgaaagtatgacagcaggcttcagaatgtcctgcttccgattgtgtccaaaatatcttattctgtagattccaggctgggcagtgtctggaatatgccattccactgttgcattactcagacccaggagtcccttgtgccaataaaaactgttgataaaaaacaaacaagcaagcaaaactcaattttactcttaaaaatgtttaattagaaaaatacatgattattcatttaatgaatattcagagaatacctacaatgagcaaggcactatcaagacattgaagatacagcaatgaacaaaacagacaaaaacgtctattttctagaagagaaactttaaagaacagcaatttgtagaaacagctttacttgttctacctttctacctacctaaattatactcaccccaggaaaccttacctgatagccacaagatgtctctcctgctgtagaattgcaaagcactcttttagcccttatctgacacttattttcacatctagattcatttgttttctatatatatatgtgtgtgtgtatatatatatatatatgtatatatatatatagaaaatgaatacatgtcagactctcttctagaagtactgagggtacagtaaggagcaagatagatatggtcccaagtttcatgaagcttatgttctactgagttgaagatggaaataaatgcaataaacaaaaagcaataaatataaaaatcttaagaatgacaagtttagtgtag

SEQ ID NO: 481733 - DNA, 1000 bp, Homo Sapiens; identical to SEQ ID NO: 119959

SEQ ID NO: 481734 - DNA, 481 bp, Homo Sapiens
tcttccgttggagtttgctgtggatgctcattagacagacacgggcagaatcccacttgttcctcgtccttttccacctcacctccatcattgtggctgaactacacgatcatgggtgtatctttccttgtggatttgttgcctctaggagttctgtatgcagctgaagggtaacaccccttgggagcttttgccttgtcctgtgacgccttggcaatcgcaagtgacagtgacggagagccacctcctctggaatgcatcatggaacaggtctgggagaacagagggtgcaggtgaagggccctcgacaatgcttctctttgcattgtggggtttccccttcaatggattgctaaagattcaacttctctgtctctttgtgtgcccgctagaaagggaaaagccaggcatttgtagtcctcctgccacagatgaccagaatgacctcacccaggacaaacggcgacagatttaggaattc

SEQ ID NO: 481735 - DNA, 1000 bp, Homo Sapiens
  misc_feature (138)..(138): n is a, c, g, or t
  misc_feature (386)..(386): n is a, c, g, or t
gagctctgcaaagcaaaagaagcctattaggaactcaagaggccccaggcaagtactcacatatttaatcctataatgacttaatcacatatttcttcactttatttaaaagatggtatgccctactttttgtgaganagcaactaaggctgctaccattgttctttagaaagctttgtatcagagctggctcaaaaattaactacaaccaagctcctctccaaagcacaatgtatttcaaactagatgagtagaaattaacaaggttttattccgcatatgcctcatgtcaagcaagtatggagagaggagggtcaaggaatgtgaagacaggaagaagcaaagttacgtacatttaattgaggggcaaaatatgtctgtgccanggatacttttaaggatatacgagttgtttagctttctataattaatgactgtgcgccatttttgagaaatatacagaaagtgcttcactcaatgtctggcaaataggaaatgtgtatttctcacccacctgcccacctctgagttcaccaaataccttcttatattatgaagaccttaccctccctcagcctgaaaaatggactctggtatctcactaaggcaccagaagcagtggtcaaacatcaaactattaaaaggaaaagtggcacaggtctaatcagaaaaataattccattgcctactttgcaacaagttctctgctctaagagattagattttggggggaaatatcacatgctggataaaggaagtggacggggagatgacagggacaggaagaggcaggaaagcaggagtctgtggcctctccgtcaatggaagcccacacggaggctgatcagggctgctggctgtacttatggctgtgggttggccggttgtgtattggtcattccagttgagtgaagcttctctgtgcccttagactctgcccagcaccttgtcctccggcagaccatccccatccaatggctcaggactctcctgtctcccc

SEQ ID NO: 481736 - DNA, 1000 bp, Homo Sapiens
gagacccagttcaccctcccctctgctctggccctgcgcgcctccacgcaccccccaccagtaaagagactcggcctcctgggacagacacagtttattgatttgggcggaggcgccgcggtgcagcggcccaagtttggcactgggagcaatggaaggaaggacagacagatgcaggctctacacaggggagccgcaggtggggactcagggtcctcttcacctccgcaaggagcgcgatggcttcgctggcctcggtgctccaagccccattggacaagagagaaagggatatggaacgggtcacagggaggggatttgggcagaagtcaaggttgaggagtggctggggtactcgctggaggaggtgggccctgagccagagctggccagtgggcttgcagagcagcccccttgacccaaggcggttgggtgggctggaggaggagtggggatgctagctgcgggtgtagtagtagttgtagtcgtcctcgcactcatcaaaagggccaggcgggctgcgaggctcgccgtcctggccagacacaggacgctcacgcaggcgcaccgcatcgtacagaccttgcggtggctcatcaagcagcacatcgcgctcggaacgggagcgcgtcaggaggcccacgttgcggagcagcagcaagacgggagcatagagcaggttggccagtcccatgccaaggctgagctgctcaaagcccagcgagtgcacaatgtggcctgccactatgggcccgagcgcgtaggccaccgaataggagatgtcggcgatggcgtagacgctgccatagactgagacatggcgcacgtccaccaggaaggcgagcgtgggcagcagtgctgtgtcgactagggctatgccaaaacagaggccgcatagtgagaccactagcggcgcgaaggagcggcaggcgggcacgatgcacgagctggcgccgatcacagccagcccaagcgcgccgtacagccactgcaggtgtgg

SEQ ID NO: 481737 - DNA, 1000 bp, Homo Sapiens; identical to SEQ ID NO: 308505

SEQ ID NO: 481738 - DNA, 1000 bp, Homo Sapiens; identical to SEQ ID NO: 308506

SEQ ID NO: 481739 - DNA, 1000 bp, Homo Sapiens
gatcaaatatatctcattttaccgtggtatttctgaaatttatgaaagttgaggctttaacaagacaggaatagtcttttgtttaatcatttttcaattattcattaagaagtcaatattaataaatcacaggcttttcttcattctaataactaagatgcaagatttatctctaataggtacgtaacatctaacaggaggttaaacttgacctctaagttcccaattcacactgagaagctattatcctatggctcttctttgtcctcatctacttcctagtcaggaaatcataatgagtgttttattaatggcatggagatcaaaacctttgtcatgcccactaatttgactttcctttcttagttgagaaaatcattgtgtcttcttccggatatacagtgctgtgtccaacatctgtgcttggttcatgtttgtaactctttctctgacaactaaaatcttatctccttctcttttctcctcctcttccctttcttcctgctcttcttctcttcttcctttcttctactttctcttctccaccttcttcttctcctcttctttttcttcttgaaattcatgaacagagcctttgttaccttcccgacgactaatttacatgtaatgaaattctactatttgccccttgtcctctgtgtctgtctatattgtaagttttcagattctgaaacttgagaacagaattctcatggatgaaaagaaatcttttggtcttaactcctttacatcattcaggccaggacagagataacatgaggagacctgatttcactcaaaggcatacagcttaatgctggaaacttaattcttaataaagaaggcccatagggtgactatcttcagaagatgacagtggaaggtattgaattatttcttttgtgaagcacgagtccagcctttttctatggcttgctgattagacctcaaagttatctgagagactgactcagcctaacagcacagcatttgagcctga

SEQ ID NO: 481740 - DNA, 1000 bp, Homo Sapiens
gatcatgaggtcaggagatcgagaccatcccggctaacacggtgaaactccttctctaccaaaaatacaaaaaattagccgggtatggtggtgggtgcctgtagtcccagctactcgggaggctgaggcaggagaatggcgtgaacccgggaggcggagcttgcagtgagcctagatagcaccactgtactccagcctggctgacagagtgactccatctcaaaaaaaaaaaaaatttctttaataagtaacaaaagcagagaaacatttgtagctaatacaaacacatttcagaaaatgaacagattttaaaacaaacaaaaaatgcatcccttcattctgtgggatgcagttgaaagaatgttatttgctagcactctatccagaattcctcaacttattgaaatagtggtatagtattgtagtatctgaacttaatatacaataatgttggttccctatggcaagttagcaatgttatagtgacagtgttagtgtaataatcatatttatggagaaaaggtagaggtagtaatattattaatgagtcatatttattatactatcagtggagacatttctttaaaaatcagcacattttccccaataggcacaattgcttagaaattaggtataatagcatagaaaattttatcataggaagttttgtcattttgcagttaagtctacaaactttgagattctgctgacctgtgctctcatcctattcatcatttagttgctgtataatgttaggcagctgtcttctcatactctcacagggaagagaataattcatttaggtgattaaatggattatgtcaagtggttatcatagaagttggcacatagttaattctcagaaaatgacatcatcattttcactagtccttattcttaactgaccttgtaatttagacattatccttactttacaatcaagaaaattgaggctttaataagttaattatcttgtcttatttcatactaataaaagcag

SEQ ID NO: 481741 - DNA, 1000 bp, Homo Sapiens; identical to SEQ ID NO: 308509

SEQ ID NO: 481742 - DNA, 1000 bp, Homo Sapiens
tgcccaggatcacacagctcctaagtagccgagccaggatttaagcccagacctatcagatggtggaacagctgtttctcaggttaccatccctgaggctttgagataaggaagttgagaccttcagtgtgagaaacagatgtctgtgaagataagccccaaaacacaccaagtttgtccaccagaactgctcctgtggctcaaatgatgcaatgtccacgccccagaatttcccttccaggaacacagcgccttgcataaagtgagggcccaccttcctgtctttcaactgcttgtgggctgggaggggaagcgaagcgcatccatttgcagtcaacgtcagcacccagcatccggacggggaggtgggctgcagcccgcagcttccagggctgttgggggaggcctaacagtgacagtaacttctcacctgcagacagggcttgacagtccacagagctccctggagagggtcgggggccgggtagggagaatggttggtaagttgtgagtagagtgagggatggacttgtgcggtgaggctccagggaggggaatgatgtcaacactcactgctccccccgaggaggggggtcgctggagccggcgtggggctgccatctctctgcatctgtctctccgccaccgttctccctctttgtgtcagcctgtctgttaagtctctctctccttctctccatctctgtatctctaccccatctctgctatctctgcctctttttgtttcctactgagaaacctgcatgcgattgtgacatggagccccagctgctggaagtaccctgcccaacctaggtctggcctgagacaccccccttggctcagggatctgccaggctggtgccaaactcatacatccactcattcagccaacaaatatttattcaaggtttgccacgagccagaccctgtgcttggcctgggctggaacagtaagcgaggccacccaggtccttgttctctaggagctcaggtccta

SEQ ID NO: 481743 - DNA, 1000 bp, Homo Sapiens; identical to SEQ ID NO: 308510

SEQ ID NO: 481744 - DNA, 1000 bp, Homo Sapiens
  misc_feature (956)..(1000): n is a, c, g, or t
ggccacagggtctgtttgctggtggctgcccagtctcccagccacccctggagtccccagcccagggagaaggaggcccgaggagaggaaacagatctttcttctcctgtatggactcagaagcaggtgcccattcctgtcccaaggcgaagggtcttggaggccgcttcctgcccctgcctcctccaggcgctggagtctcaggaggcgttccccgggggacactgcatctccatggtgactgtgttgggcgtgctgcccccggcctcccccagctcagcgccgtcccgcagggcccgctggaagaccaccctgagcggctcccacagccgctgcgacttgtccctcccggccaggaagtagacgatgggcttggcgctgctgttgatgcagatgcacaggtcagtgacgtactcggggaagggggccgggatctggaagacccagaagaggaaccagtcgatccctaagtagatggaggacaccaggaagacggagaccatggccaggatgacgtggttgagcttggcagagcgctggcgccgtcgggcccggcactccacgtgcaggatgagggccaggcagggcagcaccatgagcgggcagcagagcaggaacaggaggatgcccaggaagatgtccatgtgcctgcaggccgcgccgggggccccgcggcccaggaacacgcagaagtagttgtgcaggcaggtgaccaggagggacaggacccacagcagggcgcacaccacggccgacaggcgcttgggccgccggcgccagtaccaggcggggaagatgaccgaggcgcagcgctcggcgctgacggccggcaggaggctcacgccggtaaggaacatgcagagccccaggacccggcacacgctgcggatgtagtcggcaaacgtgcccaggaagccccccgtgttcaggatggagaacaccgccttgctgaagannnnnnnnnnnnnnnnnnnnnnnnnnnnnnnnnnnnnnnnnnnnn

SEQ ID NO: 481745 - DNA, 1000 bp, Homo Sapiens
gggggcagtctgagcacctcaggcccagaaattgagctaaagagaggtcgccattctgggccttgccactggtgtgccagcagaggtgacagaagagaatcatggtgaactgagctgtctagccctatcatgtggtctagaaggtgacagtgggctcttggatagcttccagtgagatccacagtcccacagaaatctgtgactcagggttttcatctgcaaaatggggataagaatcctgccctaaagatgtcacaaggctatcatgaagctccaatcagacacaacttgtcaaaagtgctttgccaaagttccagtgccatacaaatttaagggaatttgattgattgattgtgatggttagagtgccccgggtataacagtggactggtttatgggtccaggggtcaagcaagtgatagaactccgacagtgtgccctgggtgggcaccaatcaatggcgagcaatgcctgttgcaaagccgagtttccttagtttcttggccccaggaagtcaccaaggcctagtgcctgggtcagggctaggggaagtcactgggaaagttacagaaagagtcacaggggtcaaagagaaggaagagggtggcatataaagcagggagtagttactataatcacacacaaaaatagatacccattggatgaagggcattgaattggtagtgcagacgaaagatggagccagcaaggagagggagatgtcacagcagcagagagagaggaatgctgtcccaaataggctctcttgctgcccccccctcttcctaaagggataatgccagtgtctatctaactgcagagaaaggggtagcagggagagagaactgagaacataataatctgaccaaaggagagggatctcttcctcctgttatactgctgcccagcatcttaatgaggtgccaggtataggcaagcaactagtcggtgcactttgaggctgaggccagaactgggccgaaagcactgcaaaggcaat

SEQ ID NO: 481746 - DNA, 1000 bp, Homo Sapiens
gatccttagatttcaacgtaggcatttattgctacaaaattcctttttagtacttttgctggatcttgtaagttttgatatgttgtgtttttgttttcacttgccttgagatataatttaaattcctttatgatttcctaattgacccaatggttatttaagagtgtattgttttttcgtcattgtgaatttcccactttcttgcactattgatttctaattttactcaattgtgatcttaaaagatctttgaaatgacttttatctttttaatgttggggggacttgttttgaggtctgatgtaatttatcctggagtatgttccacctgtgtttgagaagaacatgttgctgaagtataagaatattctgctgctgttgagtggtatgtaatgtatatgtccctaaagtccaactggtgtacagtgttgttcaagtactctctttctttatagatctcctacctggatgttttatacattattgaaagtggaatattagattctactactagtattgtattgatatcaatttctcctttcagatctatcaacatttgctttgtatatttaagtgctctgatattgaatatgtatatatttacaattgttatatcttgttaaattgacccttttattattatataatgaacttcacctctagaggaagtttttgactttgtctattttgtctgataggatagcctcccctgctttcttttttttttctttttaccattttcataatatccttttccatctctttacttccagcctatatgtatttttaaatctaaagtgagtctcttatagacagcaagtcactggatcatgttttttgattcactcagctactttaagcattcttatttgggatattaagccatttacattaaaataattactgattgctgaggacttactaactgccattttgttaatagttttctgttttgctcttgttttaatcctctctctcacagtcttccattgttaactga

SEQ ID NO: 481747 - DNA, 1000 bp, Homo Sapiens
  misc_feature (313)..(313): n is a, c, g, or t
gatcagttgaagccaggagttcgagaccagcctagccaacatagtgaaatttcatctccaataaaaatacaaaaattagccagacatggtaatgcacacctgtaatcccagctacttgggtggctgaggcacaaaaattgctggagcctgagaggcagaggttgcagtgagtgccactgcaccccagcctgggcaacagagtgagactctgcctaaaataaaataaaataaaatgtataaaagctgtaaaccaaccaccttgggcacctgttcttaggacttttaggggctatgtcatgggccttggtcactncatatttggctcagcataaatctctttaaatattttagagtttaactctttttgtcaacacatcagttgacagtgatcagtagtctacctaaaactgcctttgtgaaaattttatcactgagaaaaattataatagtaagcagagttaacaccctccacctgcaccaccttgcctttcccttgattatttgggggctattgggccaagctaactttggaagacattttaggttatcatttaaatgataacaggccttgccctgaaactcctctcctccccaaagccttttgtaaagccaatgggagaccatcaggcttggaggagaggagcttgagtcctaagattggccttttgagatgtcttttcaggatttttgcatgtcagacatccatggctccacctgaacccacctgaatcccccaccaaacccacccctgtggccctgcccagaagcaattctgcctgcaggaggcagaatttcatctccaccccaaccaatcagcagcaagcacctattacctggccaccctcatccctttgtggagtcctaattagggaaagggaaccaggctggtggaaccaagagaaagcaaaaagagaaagcagataagcaacaagtctgtctttcttcatgatccaggacacacagccctcctgcacaagtaacttacaacctttcctgcacc

SEQ ID NO: 481748 - DNA, 1000 bp, Homo Sapiens
agccgtctgtatctatgggttctaaatccgctgactcaacctcagattaaaactatttgaaaaataaatactacaaataaaaccaatacagtataataactacacatcatttacattgtattcggtattataagtaactagagatgatttaaagtatacaaatactatgccattttatatcagagacttgagcatccatttattttgctgttgggggtggggtggggggtcctgtaaccaatcctctgaggataacaagggatgactctattaatatattgattttatattacaatacatactagtgctctgaaattcccaaacaggctggtcattgttttgcattattttgtaatgaaattcaagcagttaatcagcagcaagaagagtagtgtgagacaaaataagatgtttagtcattgtatgattttttttttttttgagacagagtctctctgtcgtccaggctggagtgcagtggtgtgatctcggctcactgcaacctctgtcccctgggttcggctgactgcaacctctgccccgccgggttcaagtgattctcctacttcagcctcccaagtagctgggattacaggcgtgcaccaccacgcctggctaatttttgtatttttagtagagatggggtttcgtcatgttggccaggctggtctcaaacccctgacctaaagtgatttgctcaccttggtctcccaatgtgctgggattacaggcgtgagccatgacgcccagccagtcattgaataattatttaaaaatgaaattttgatgtagtgaaactttgtcttttgtggaagtgcctatgagtctgcaacctggtggtcattgccaaattgccattggttcacacttgtaattaccagtagccaagagagccatgtgactactgtaagccctactgaaaccactgactgttaaaacaagtgtgtttgtttgacacattgtgtgtgatccttgtctacagcccaaatgactgttttgg

SEQ ID NO: 481749 - DNA, 1000 bp, Homo Sapiens
cacttgtttggttcaccactctgtacccagggctgcacaccatgtccaacacataacaagtgcttcgtaatgttttttgacaaaatgaaatgctgactacaataaaagtctccagccaggtctctttgcctcctgccccatcctttctgattcatgtctgatgctttggatagagccatattcttaaaacacaagttttatcctacccagtccttcttcggcagagtgtttattgggtcccacaaccctttttggaggtttatgggaaattaagtgaagttaggatcgagatgatagtgggaaaatgtgctgtgtgtcattaataacaatgcatttaattttaaattggggtttacttcaaacccaaaactgtgggtttgcttttttaacccatgagcacaacaggaaatgaatgagtcaagcttcctagtatctagggtcctctaggttgaggcttgatcaaatcagccctgactgcccagacctgccacttaggcagcagacctgtcagtggtcccaggtggtcacagcctacagcttcccttgctgtgctgttcccatgtggggctcagagaccttccacccagcagagcagcatgggctctgggggtgggacccagcttcctagggactgtgtgtcttctgtgaaagtgtgaacactgaggccgggggatgaatatatgctgggtagacaaggcacaccctgactatagctatttacaaagttgggaaaacacagtttattgaatttcctcttcactcaatggtggcccatttaccccctctctgtactaagaggaagttccattagctcacacaaagacagcattacgcattcctcagcttggaaaagcccttgaaggagattgctcagttgaagaacagctggggccttctgttgggggctgtaatccaaattcccaagaaatctgcaagtgtctcatcagccccggctgcttggaaggactcgctcagtttctcccaagggcctgtctgtggt

SEQ ID NO: 481750 - DNA, 1000 bp, Homo Sapiens; identical to SEQ ID NO: 308513

SEQ ID NO: 481751 - DNA, 1000 bp, Homo Sapiens; identical to SEQ ID NO: 308514

SEQ ID NO: 481752 - DNA, 1000 bp, Homo Sapiens; identical to SEQ ID NO: 308515

SEQ ID NO: 481753 - DNA, 1000 bp, Homo Sapiens; identical to SEQ ID NO: 308516

SEQ ID NO: 481754 - DNA, 1000 bp, Homo Sapiens; identical to SEQ ID NO: 308517

SEQ ID NO: 481755 - DNA, 398 bp, Homo Sapiens
  misc_feature (376)..(376): n is a, c, g, or t
ttgaagcagatggtgcagccacagttcgtttgatttccaccttggtcccttggccgaacgttcgaggggtcctggaactctgttgacagtagtaagttgcaaaatcttcaagttgcagaccgctgatggtgagagtgaattctgtcccatatccactgccactgaaccttgatgggaccccactttgcaagctggatgcagcatagatcaggaggttaggggctctccctggtttctgttgataccaatttaaataattggtaatgctctgatttgcccggcaagcgatggtgactctgtctcctacagatgcagacagggaggatggagactgggtcatctggatgtcacatctggcacctcggagccagagagnaggagccccaggggcggtcaac

SEQ ID NO: 481756 - DNA, 1000 bp, Homo Sapiens; identical to SEQ ID NO: 308518

SEQ ID NO: 481757 - DNA, 648 bp, Homo Sapiens
acactgacaggctcctcagagcaactggctgggtagcaagggggctgtgactgaagaacatgacagaagccaatccattgtacagcaaccaccaaggccaaatctacttgccaccttcctcatatctgccaagtgctcacaaggccttgtcgatgaaagggaaactgaggcagccaatggggtgagagggcaaaggtcacttcaggttgaggcagaggcaggatgaaaacacttacgtcggaggatctctcgttgctttctgacgtaccaggtgtacagagcggcacgcttctgggtcttcataggggtgcccttgttgagatgctgggagaggtgcgactggttcaggccggtgacatcgaccacctccctctgggggatgttgtgttgctgcatgtaacccttgatcattttagcagccctccaagggtcctcactagacagacaagcagatggttagggtactagtgggagacatctggggagaaacattctttttctagggggtgctacctatggtctatgcaaaattctgaattttccccccatctaagctacaactttggggtagacatgaggccaaaatggaagctaaacagaggagaaggtgactgcccctgtacggtacacctcatccctttcttctga

SEQ ID NO: 481758 - DNA, 1000 bp, Homo Sapiens
gatcctcctgggtcctcctcaaacccagctgtgccccatcttcctccccccatcccgaagaccactcctgtccagctcccatgtggctctcttggtgctaaccccagagagtcccctccccttcttcttctttttttttttttttcgagacagagtctcgctctgtcacccaggctggagtacagtggtgagatctcggctcactgcaacctccgccttccaggttcaagcgattctcctgcctcagcctcccgagtagctgggattacaggcgtgtacaccacacctggctaatagttgtattttttttagtagagatgaggtttcacaatgttggcccaggctggtcttgaacacctgacctcaggtgatccacccatcttggcctcccaaagtgctaggattacaggtatcagccaccatgcttggccccggctaatttttaaaatttttgtagagatggggtctcactgtgttgcccaggctgatctcaaactcctagggtcaggtgatccacctgactcagcctcccaaagtgctgggattacaggcgtgagccactgcgcctggcccttgaagccctttatttactctgcactcctgctctgtctctctggcctcctggctggcctccttctcttctggggccctttctctacccacacttaatccacaccgactcctacatttctctcctagccacgcagctcccctgagtgccattctccatctcccgtgtttgacatttccagcatcttctaaaatatctcaaatcagcccccaatttcaccccagactccctctctagtgatagactagtgtcaacactagtctatcggtgttgacagcaatttggggcaaaacccttgcaagagcccagggggtcttgtctcctctgtctccctctcctcctcatctatgaagaaacatctagaaagtgcctgcatcatccttctctctctgcacactcgctctggctcttttcaccacagtggtggat

SEQ ID NO: 481759 - DNA, 1000 bp, Homo Sapiens
gatcatctaaagaaaagattgtcagcagaacagaggaacaggtctttctaaattaacagctatgtataagatacagtcattgggtagaaatattgagaaagagagtacaatgaggagcaaagaaaacaagatgagtgtaaccatgaaagtataaagaaatgtttcaagttaaaattaaatattaaagcatgccaaataatcattgatgacctcaacaatgtctatttcagccatgaaaattcataaaggaaaatcagtgaatgtaattagctcttttgaaaaagagaagataaatggggaaaagtaccaatggaagttctctgatttttatttctaaatgtaattatatacatgtatgagaagaaagcacccttgcatgctgatagaaatggacaagcaggaagataaaaatgatgatgctagtaaaaggagataattgcagaaaaaaagccctcaagaagatgacaagtgatggaattcaataacccagaaaacttctgaacaatatattttggctgtatatcaccttcagaagaaaagaaaaaaagaaatttataaagaaatagtgaattctcaattataggttttgtgactatatttagcaatatgacttggcagattttagattagtttctgtgtatttaaggcagctaataatgaaatatatcaatatgtttattttaaacatagagaaaagagaaattggaataaagcttgagatgctgaattggaatgaatttatgtctaataagatagatatagatatagataatatagatatatatgcatacagttgctagttatgtatgttgagaaggacaagaagtgatgaaattccatagcaataattccatctagcatgtagaatttataaatatacaaacacacatacatttctaaattactttctttactaaggaacttggggattactggagaaatgtcttattctgatgctgaaacagaggaagtattaaatgtaattagaacattttatgtt

SEQ ID NO: 481760 - DNA, 1000 bp, Homo Sapiens; identical to SEQ ID NO: 308519

SEQ ID NO: 481761 - DNA, 1000 bp, Homo Sapiens
aatattaagatgaatgtattactgcaaaaatcatgctattgatgatagaaaaaaacactgagatctggcaatgttatcttagtttacaatgggggaggtgtttgccagattttaaatgctatattaacattccagaaaggatgaataattttttttgtcttttgattgatcttaaaatttgtggacattaattattgttgttaataataccataaaatagccaggcatggtggctcacacctgtaatctcagcactttgggagaccaaggcgagcagatcacttgaggtcaggagtttgagaccagcctggccaacatgctgaaaccccatctctactaaaaatacaaaaattagctgggcatggtggcacatgcctgtaatcccagctattcaggaggctgaggcaggagaattgcttgaacccaggacgtggaggttgcagtgagctgagatggcgccactgcactccagcctaggcgacagtgactctgtcaaaaaaaacaaaaaacaatacaacaacaacaacaaaaaaaaaacaaaaaaacccagccaaacaacaacaaaaaaaactgtaaaataagctggagtgtttttgcttcatctggatggttgaactagctaatctctagggtagcttctgagcctatgtttttactgagcacagtatttaattattgatactactgttattaccaccatcactgcttttatcctaaaaggccctaagtggctttatgaactgaatatatagggagcatgtatccatgatcactttgttgtgctgaagcacattaggacatattcgcaagcttgaaatgcaacctgaggacaatgtttgtgttacaccatctacatacctacacatgacaaaagaccaaatcagaaaagagggaaaagaggtaacctgcttcaaatatgtcgatctgtggattaattctacctacacttttgctacctgtgagaatgtgttaattggaagcagtgtctggtgatgcaaag

SEQ ID NO: 481762 - DNA, 1000 bp, Homo Sapiens; identical to SEQ ID NO: 308520

SEQ ID NO: 481763 - DNA, 1000 bp, Homo Sapiens; identical to SEQ ID NO: 308522

SEQ ID NO: 481764 - DNA, 1000 bp, Homo Sapiens
aacactgtgctctctctgataaaagccacgtctccagccccgtctctcagacacctgtgaaaagagaaaccatcaggggtaagcacaggcagccctccccagcccctccctgtggaacagtagccctggcactcagcatctatgggtttctactccctgcagggcagggctctgaagctttggggcatcccagctgggaaggtaggggccccctccaggtagatactgaagaatgactcaggtgctagccagaggcccccatcttctgctttgagggctaagaggacaaaacttttttctatataaaggagagttttgaagcctctacccaagagggtaaagccttagcatcactgttcatgtggctgttttcctcaggactgagtgtgcaggtgtgccctggccagtggggaagtgtggaggcctccctctgcaaaaatacgctagtgccagcagacagaatggaaaagggggagctcagcctccgcgtgggggcagagaggatgggggcgaatcaggcattgctcactgtccttcagccacggggagaggcccaggtgggcagaaggacatcagcctggacactgcagcggtcctgcccaaccaggagccaggactggacatctcatgacaagatgccttcagtcctgctgtggttaggcaggcggcagaaattagtatgaggaacccaggacaacagggcagccaagttggattcagggctctctgaggtaacaggagggcccacagccacagtgactgcccgtggggctggtgagaagttgggggcacagttgggcccggaaggctggaggggaacacacactgggcaggcctgcactctctttggacacacagcagtaggagaacagacctcctctcgtccccaagagcaggctgggctctatgtggggccagagaaaaggcctcccggcctgaggccaagggacacttggccactgacgagaaggggacagggtcactcacttgaaggcaccag

SEQ ID NO: 481765 - DNA, 422 bp, Homo Sapiens
  misc_feature (12)..(13): n is a, c, g, or t
aatcccttccgnngagaattagtatgttagtctataactgtcgctcagagtgattgtgtaaaaaataagacctaatagaacattccatgttcagatattgccaagatggaacactccccgaatatacaggttaaatacaatcgttagagactccccaagctggtttctctgtagaaacagatcctaaaatttataaacaaacccaagaactggcacagtgtctcacacctataatcctaacactttgggaggctgaggtgggaggatcgttttagttcaagaccagcctaggcaacataatgagaaccctctctacaaaaaaaatttttaattagcagcgtggtggtgtgcgcctgtagtcctagctatttgaaaagctaaggcaggaggatccctatagtgagtcgtattatgcggccgcg

SEQ ID NO: 481766 - DNA, 1000 bp, Homo Sapiens
ggatcccttgagcccaggagttccagggtacgtgaactatgattgtgccactacttccagcatgggtgacgagcaagatcctatctcaataaataaatactaaatgaaaaagacattaagtggaaatgtaaagggctaagaataaagaataatcaaagacaatattgaagaaaagtcatggttgaggatatatactaccagatattaagacttgttataaaggtacagtaattaagacagtgtgatactagtgcagttgaacaggatgagctcagaaacagactcacatatatatatatatttgatatactttatttatttattattattttttgatgcggagtctcccactgtcgcccaggctagagtgcagtggcaccatctcggctcactgcaagctccgcctcctgggttcatgccattctcctgcctcagcttcccgagtagctgggactacaagtgcccgccaccatgcccggctaattttttgtatttttagtagagatggggttttaccaggatggtctcgatctgctgaccttgtgatctgcccacctcaacctcccaaagtgctgggattataggcaccaccattacgggcatggtgagccaccatgcccggcttattttttttttttttttttgagacagatttcactctgtcaccaaaagtatagtccagactggtgatcatggctcactgtagcctcaacctcgcaggttcaagcaatcttcccacctcaagcctcccaagtagctgggactacaggtgtgcaccaccacacctggctaattttattttattttttgtacagatgaggttttgccaagttgcccaggcttatatgtgatgtatgacagaggtggcactgcagagtgctgggaaaaggacaatcttggtactcgtcaaatggatattcacgtggaaaaaagctgaattgtaaactctccttatccatactcaaaaaaatcagtacaggtcaactgtagatttaaaatg

SEQ ID NO: 481767 - DNA, 1000 bp, Homo Sapiens
  misc_feature (15)..(15): n is a, c, g, or t
  misc_feature (28)..(28): n is a, c, g, or t
  misc_feature (30)..(30): n is a, c, g, or t
  misc_feature (37)..(37): n is a, c, g, or t
  misc_feature (40)..(40): n is a, c, g, or t
  misc_feature (43)..(43): n is a, c, g, or t
  misc_feature (50)..(50): n is a, c, g, or t
  misc_feature (62)..(62): n is a, c, g, or t
  misc_feature (72)..(72): n is a, c, g, or t
  misc_feature (81)..(81): n is a, c, g, or t
  misc_feature (87)..(87): n is a, c, g, or t
  misc_feature (90)..(90): n is a, c, g, or t
  misc_feature (103)..(103): n is a, c, g, or t
  misc_feature (108)..(108): n is a, c, g, or t
  misc_feature (112)..(112): n is a, c, g, or t
  misc_feature (121)..(121): n is a, c, g, or t
  misc_feature (141)..(141): n is a, c, g, or t
  misc_feature (171)..(171): n is a, c, g, or t
ggaagaaaagaaacnagaatagagaggnanccaaggngantgnaaggggnaaaaaaatcccncagggggaanaaggaaganattccntgntcgcccggaggcnggccnagcntaggttgcntgcatggggctgggagagtngaggtcaccaactggcttcccaagcttccnggcccttggcttccaaagggggtagcttggagcgcgcgcctgagaagagccctggagcagggccggccactgctgtgcagccgagccacgaaggtgcaaagcggggccctgtcctgccccggccgggtgtggggagacagaggacgcaaacctaagagggcacccagagcgccggggaacgcagcctggggacctcgaagcccctcgaaagcgctcctctagaggtgacagcaccagatcctggcgaaggaccaggccccggggtcggaggatagggggacaggtggccggggctccgcggcggctgggactccgcggctgctggggctccggctcgctcaccttctcctgcgcgcgggtgagcttcttctgcacgttgctggcgatctttcccgccgtcacccctttactgcccatctctgccatcgcggcgcaggcctcgcccggtggcaagggccgctctcgcgcggggagagatcttgcgcgccgcgctcccagcccccagccccggccgcgcgtccagaccggctgccgctccacgccgcgcaacccgacagcggagccaactgacggaggcggagcgtgcgccggacgggcgagcgagccagcgagctagccagcgagcgacgcggggacagagggagggagaggggaggggccgggcctcaggccgcggtcggcgccccccgcccgccccctccggacaataagctgccttttaaagggccactccgggcgccggcaccgccaggtccttctaggatggatgggcgcgcgcggcgctggggctgcggcgagcgggactcccctgacgctccagctgcaccgc

SEQ ID NO: 481768 - DNA, 1000 bp, Homo Sapiens
  misc_feature (6)..(7): n is a, c, g, or t
  misc_feature (13)..(13): n is a, c, g, or t
  misc_feature (21)..(21): n is a, c, g, or t
  misc_feature (37)..(38): n is a, c, g, or t
  misc_feature (43)..(43): n is a, c, g, or t
  misc_feature (47)..(47): n is a, c, g, or t
  misc_feature (68)..(68): n is a, c, g, or t
  misc_feature (96)..(96): n is a, c, g, or t
  misc_feature (114)..(114): n is a, c, g, or t
  misc_feature (127)..(127): n is a, c, g, or t
  misc_feature (150)..(150): n is a, c, g, or t
  misc_feature (157)..(157): n is a, c, g, or t
  misc_feature (640)..(640): n is a, c, g, or t
ggcggnngccttnggttcctnagttttaatttcctannttttngcanagggggttggaggcccaccantcccaaacctttcttagcaggggaccantgtttgcaagttcccagngggcaaattcccnaaaattaaaaccttccaaactantccccantagggtttttgagtgtgtggaaggtgtttgttgggaggccaccacaagcttggatggacagctttcctaacaggggaggtttgtgtgggaaggttcttggctaacccacaggaggaaggtgaggccttgagggctggaccttgaggaggcagtcagctctcggggagtgcggggaaggccggccacctctgggcaaatctgacaacacgtcagcccactccagcactggcaagatgcgcttccagcacaggtactccagcccgacctccaccatgaaggacgtaagacctggggctgtgggccgggctccccagaggcacctccacggctgagccaagagcccactgggagagacccaagaccctctgcgtggctccttgctgagccaagggcccgtcgggagagacccaagcccccctgggtggctccctgctgtatctgggcattccacgcctcttagggagtgttgcacaccggcagttntgccctgcagcctggccgctgcccccgccctcgaggggctgacagcagctgtgggagctgaagtccaggtgcttcagccattccaggaccttccaactctccctggccctggaagccttccctgacagccacagtcctccacactccccgatcccctctgccatagcacccactgcatcgcgagggcgctgctgatgtaactgctgcgccgggagaggcggcaccttcccctctgcggccctgcatctggccttagtacatgctcagagatgggtgatggaggatgatggaggatgatggatggagggaacaaagggtgagagagggaaactgacactctctctggccagattcctggct

SEQ ID NO: 481769 - DNA, 1000 bp, Homo Sapiens
ctgggataatgtgtacagcatcctcccattcaacatgagaggatgagccaatgagagttgagtcgactttgtcttcctcaaatgtgattttggttttcctatgtggctggttggagtcataagggccatggctatttgaacaagtgatggcacattcctccagtgagtcctcagggacttccttttcttcagccttcggcatctccctgggggcagacgatttctgcactttctcagccacctcaacttgaacatcttcatcgtcatcgttgtcattttctgtaaatacagaattgttcgttcagatatttcccacttcacagtctgcaagcacagtcagcccaatgtgcaacagagacatgaacatctaggcatgggtcaccgttcaactgaaaactctcatgttttatctttaacagaatgccctggcatggtttcctgatccatcaggcaatgcatttctgatctggagggccaccatcaagatgtggccaaatattgaaaagaccttttgcttcccatatcactggaggcttgtgcagcctctctctggactttggcagctgtctgcccccatcctgccagatctgattcccaggcacaggcttggtgtcctgtcacagtttgcatttcaaacctaattctttctcttagaagcagacaaacttgtcccacagtcctctatgcatcagaagatttcaagcctccaagtggcttctgctgtgttattcagggacattctatccatggggagtgctccagtctgaagcacttcctaccacgaaacgccaccacataaagtgccttctccaacatcacacggcgaggggcttcatctcattttggaaagcagttttaagtgttcccacatttgaatgcttcagacccttgcaagagacaatttgccatggagagagagaaactcaggaaagacaagtcattcactcactgacagttactaagaacattgccgaaaagacaccctgggaaccttcattct

SEQ ID NO: 481770 - DNA, 1000 bp, Homo Sapiens; identical to SEQ ID NO: 308524

SEQ ID NO: 481771 - DNA, 1000 bp, Homo Sapiens
  misc_feature (159)..(159): n is a, c, g, or t
  misc_feature (909)..(909): n is a, c, g, or t
gcacattgtggggtgtcctctgctccagtcttatggtctggtcagcatagtatttctcttagcttctgtatactgcctacatttatgcgcagtgtgtgtgtagacattgcgtgaaagggcttatgtatgccatctcctcttcatttatgtatatcagcntcttacaggttggtcctattatggaccccatattgcagctggggaaaatgagaagagatttaaggtcatagtaagtgttgtatccagaattcagacccagaagtggttcccaaccaggggtgattttacctcccaagggacatttggcaatgtcctcagacatttttaattgtcagcactggcatctagtaggtcgaggtcagcaatgttgctaaacatcctccaatgctcaagaaagctcctcagacaaagaattatccagcctatgtcaacagtgctgaggtctagaaactgctccggagcacagggacactcttttgtgtcagccttcaaaacatcttttgcaatacttagaaactttttttaaaagaagagcatggggcaaaattgctggaccaagctcattaatatctattgaagtgtgttttgtcatttagtgtccctgaatgtttgggataaagtcccaaatgtaaaattgagaaaataatgccttctttgtctacctctgtgggttgcaaggatctgtggaggctctgtaagaatgtgaggagataacgcatacgaaagccttggacatgaaacatcatccaaaactcttggaghccttggtgtgaaaatattaatgtgggccacaggaattagataargaagatcccacagcaggcttctttttgtttaccccgcctaccttgtcagcttacaccccctcttccttctctttabcctcccatttttgtaagcgagtttgtncctggtatttactgcatggactaagccatttttagatgtattttttgctgaatatatacttttttgatttagtatttcttgccatattaca

SEQ ID NO: 481772 - DNA, 1000 bp, Homo Sapiens
ctgaaaaataaaacaaacttgccttaaaaggactaaatgattccaatgtcactgctgcatcggggacacaacatctgctccatagaagcagtttagatcataacaaacagtttttgatgtttaagagaccggcataacattcaacccaagggaattaatctgctttgtctgctggcaagaagaattgcttactgctcccggctgggtcccattgcagagttggtgaactaagatgagactgcacccgtgggtttgagtgcagtaaaatgaaagcaaaccagtaagtacatgttaggttgaacttcatgaaaccactatttttgtgggtccaaaagggctaaatatcagcacttttatatggttcaacctaaacacatcctgagaggaagacataatagagaagctaacaaatgtcttatgtctaaccatccttcttttagggaacactgaacttaaaaaagataatagctggtctcgctaccaagattgttttgagggaagggtcttaaagaacacacgcacctacctcaaagaaaaggcatgggagaaggggacagaggagggcaaaacaacagggattcaagctattaaaatgccctatgcccttggcagggtttaactatgatgggtatggtacaagcatgatttccacgcagtagcagacagcttgggccccactcgcagatcttccaagaaattatggaggactaggataaattcagtgctctggcagctgtttcttccatttcctacttattctgcccattaaaagaagagggccatctgtgctgcaaagaaatggggaaactggagcaaatgccatagttcataaaggaaatagccaagggggtagggtgtggcgggggttgtggatggacaggagggtgctttctccggggcactaggaaatatgccaatcccaagcatggccaccaggaggccaagcggctgcacacacctctgcctccacatccccaggaggtggagttggctggagact

SEQ ID NO: 481773 - DNA, 1000 bp, Homo Sapiens
ctgtaagttaaaaatcaagattgtaaaagaatagctatgtagcctgtggtaggcagcatctaagcagcccccagtgatctccatctcctcatgtattatagccttaagcaatccccttgagtttgggctgcattagtagtgtcttgcttcttctagtgcatagagtatagcagaagtgataggctatcactgccgatattcggtctcaaaaaactggtttctgccttaggggctctctcttgctccctttgagggaagctggatgccatgttgcaagctaccctgtaaaggggaacatgtgccaaggaactgatgtccttgagggctgttggccagagacattagtcttgcctgtagcccatgtgagcatgcttgggctgtgtcttccctgagctgagccttgtgatcactgcagtttggccattacctgattgcagccttgtgagagactccatgcctgagggagctcggtgaagacacacttggattcctgactcacagaaactgtgagactaaatgttatcttacactgctgagggtttgggcaatttcttacacagcagtaggtaactaatacacagccatattccacttttacctgtatcacaaggttttctgattattgtcactatgtgggagaagtcattactaagttactatcagaatccctgcctccaagataccccttgactcaactgccccaaaaccctccgtttgttgaagtcttgaattggatcttgggttttagaatagaaacaaatacagctgttaggaatggcttcgatacaaactatggaacttgaagagatgtggaccagggatttgagaaggaaactgttctttcttctgccaaaaatacaatttggtacttgaaggggtacctggcacccagggatggaaacattttaagttaagcactttaccttttaaatgccacgttaaaaatgaaatatattcataacagatactaacgaggaaatatggtcctattaagtggaaa

SEQ ID NO: 481774 - DNA, 1000 bp, Homo Sapiens
tcaggaacgatgaggagtctaacactacatatcctacagacataaagatcataaaatgataatagaaattactttatgccaataaatttgaaaaagtataggaaatggataaactcattgaaaaatataaattccaaaacttacacaagaagatgtacaaaaatctaaatagttttctacatagatttataaattcaatctataattatgtcttcctcagtgaattttacaaataatttaagaaattgttctaatctcatacaaaatcctcaagaaaatagaaaaaaatttaaaaattttttattttttgagaccaaaatgatctcaatacaaaaatgtgacaaggaacatacaaaaaaggaatatcacaggtcagtctcactcataatgcaaaaatcctatgatgcacatagataaaaatttcctcagcaaattatttgttttttgcatatatttctaaattatactttaagttctgggatacatgtgcagaatgtgcaggtttgttacataggtatacacgggccaaggttgtttgctgcacccatcaactcatcatctacattaggtatttctcctgatgctgtccctcccatagccctcaccccctgacaggccctggtgtgtaatgttcccctccctttgtccatgtgttctcattgttcaactcccacttatgagtgagaacatgcattgtttggttttctgttcttgtgttagtttgctgagaatgatggtttcaagcttcatccatgtccctgcaaaggacaggaacttatccttttttatggctgcatagtattccatggtgcatatgtgccacatttttttaatccagtctatcattgatgggtatttgggttgcttccaagtctttgctattgtgaacagtgctgcaataaacatatgtgtgcatgtgtctttatagtagaatgatttatgtacattttagtatgtacccagtaatgcgattgctgggtcaaatggcatttctggttct

SEQ ID NO: 481775 - DNA, 1000 bp, Homo Sapiens; identical to SEQ ID NO: 308529

SEQ ID NO: 481776 - DNA, 1000 bp, Homo Sapiens; identical to SEQ ID NO: 308530

SEQ ID NO: 481777 - DNA, 1000 bp, Homo Sapiens
cagaggttccagtgagccaagattgtgccactgcactctagcccaggcaacaaagagagactctgtctcaaaaatagaaataaaaaaataaaagaatcaattatcttagaagtattaatattaggaaaaaaatgagaatccaaaaagatggttgggtataagatgaataaaaaataaatcaagagtttttctcataaaccagcaatagttaatttaaaatatgataaaatagtaacaatagcaaataaatgcataaagaaagtaaaaataatcctcccaagaaatgagaagacataaattttcagagtcttatttacttatgaagttcggaatacacacggtcctggatttatggaggcttgacttaaaatttatagacttcacattggtccaaaagcgatgtgaattcaggagaagccacacttcaggtacacatacaaccattcattcacctccagtacagtagccaataaattccatgagatagtcagcaccctattataaaatagaccttgtgttagatagttttgcctaactgcaggctaacatagggttctgggcatggttaaagtagtctaggctcagctatgatgtttggtaggttagatgtattaaatgcattttccatttaagatatcattttgcaatgtgtttatcaggacctaaccacatcataagtcaaggaacatttgtacatgcttctccttgtttttctcttaatttacgggaaggctcaataatgtgtgtgctgggtcccaagcacatgtggaatggtgaccagattaaaaattatcattcagaaaagaatcagaaattattcccctcattctcatctgattttgtgggtcttgatccagagcttgcctctgcccaagaaaagcagtaaatccacgagagagagtgttcgcaggtgtgagggtgggagtagtgggagcctttctggaggtgggacacatacgtggctgcctcctcaagcaattggggacattgtctcaatcct

SEQ ID NO: 481778 - DNA, 1000 bp, Homo Sapiens; identical to SEQ ID NO: 308532

SEQ ID NO: 481779 - DNA, 1000 bp, Homo Sapiens; identical to SEQ ID NO: 308533

SEQ ID NO: 481780 - DNA, 1000 bp, Homo Sapiens
caggtttaaagattatttctttcagaaatcaggctgggaactaaagagaacaatataaaaacaaagattaatttctgagaagccccaaataaaagtttacaactgcgttttcttgttgtgactgagagatttaacatagcttggtgctttctttcccacagtatgtcttttaatctctctcataaacttctagggatccagattagatgatcaaagatgtgctccaccacctgctaccacaaagggtccgacagtaccagatgaagactttttcagccttattttacggtcccagggaaagagaatggatgaacagagagttcttttacaaagagatcaaaacagagacactgactttgggctaaaggactttttgcaaaataatgctttgttggagtttaaaaattcagggaaaaaatcggcagaccattagttactatggatttattttttttcctttcaaacacggtaaggaaacaatctattacttttttccttaaaaggagaatttatagcactgtaatacagcttaaaatatttttagaatgatgtaaatagttaaccttcagtagtctattaaggcattaatacttctctggacatgcgcgtttgagggtggaggggtcctgtaaggtgcttcatcgtctgtgattactgcttgggatgtgttctttggcagcttgtgagattactttacctagtgtttataaagtaggaagttaagtgaatcatagattagaatttaatactcttatggaaataattttttaacatcttaattgacaatggcgtttttttatacataaccatggatgtagtgggaaacaatgttgtttggtaaaaataatgtacttgatcaatgtaaaaaagtatataaaatagtcttactaaaaatctaggtttttttttcctccatgaaaatctgtttttttaggccaaagtcagtataaaagaaactctacttcttgggctgggcatggtggctcattcctgtaatccc

SEQ ID NO: 481781 - DNA, 1000 bp, Homo Sapiens; identical to SEQ ID NO: 308538

SEQ ID NO: 481782 - DNA, 1000 bp, Homo Sapiens; identical to SEQ ID NO: 308539

SEQ ID NO: 481783 - DNA, 1000 bp, Homo Sapiens
gtagagacagggtctcaccatgttgcccagactggtcttgaactccagcctcaacctcccaaagtactgagattacaggcgtgaatcaccatacccagcctaaggcaactgacaactggcaagctacaaatgcatcaagaagctaatcacatttgagtcatttgagtaatcagtaatttacagaactctcctttttttttttttgttaatagtgatggggtttcaccatggtgcccaggctggttttgaattcctgggctgaggagatccacctgccttggcctcccaaagtgctgggattacaggtatgagctaccaagcccagcctgcttgacatttatcctatggaacactccaacaagtaaaatttaaagccagctctcatgacaacaaagactctaccctcagcgccaacatttctcactacttacgcatttcattttggttaagtatgatgtgcctgcctctaacctactaaggcaagaacaataaaacatatacaagggacagccagcctcaaaaaggtgacttgtctcccacaagccaggttctctgcatggaaactgaaggtgctcttatcttccgattgtggagtttattacattttggtatcacaaaggaaccaactatccagaataacaacacaagatgttttaccttatatatcttagaaattttaaaagcatgagctgtgcgcctccggatgacatctgattcattcgtgggaggaaatggattgtagagtaaggttttgtcatttggaaggggctaaaaaaacaaagacacattgtttaaatggttacttttattgggcttctgcagaccaaagatctgtagtgcattttgagcccaacatcatcttctaaccatcatatatattcagtacctccctgacattcgttaattcgggaaaacagctgtagccataatacctctattcagaaaaactaggggggaaaaaaagaagaaaaggagagagagggagaaagagctgaagcta

SEQ ID NO: 481784 - DNA, 1000 bp, Homo Sapiens; identical to SEQ ID NO: 308540

SEQ ID NO: 481785 - DNA, 1000 bp, Homo Sapiens; identical to SEQ ID NO: 119961

SEQ ID NO: 481786 - DNA, 1000 bp, Homo Sapiens; identical to SEQ ID NO: 308543

SEQ ID NO: 481787 - DNA, 1000 bp, Homo Sapiens
atatggcaggaagtagaaatgggcagaccaagtagagaaggaaaatagttcatctttctgggacactaataaggagtagtatataggagtgggataaaaagtaggatataggagtccaaatttccatcaaatctatagattgattttctttgcattaattaagacttctggtggaacgtggtggctcatgcctataatcccagcactttgggaggccaaggtgggtggatcacctgagatcaggagttcgagaccagctggccaacatgatgaaactctgtctctactaaaaatacaaaaattagctgggcgtggtagcaggcgcctgtaatcccagctacttgggaggctgaagcaggagaatcacttaaacctgggaggccaagtttgcagtgagccaaggtcatgccattgcactctagcctgggtgacaagagtgaaactcagtctcaaaaaaaaaaaaaaaaaaaaagacttatttgttgttgctaaaatgcaaagattctgggcttatgaagaaactaatactccagtaggaatgcttgaaataaaaatatctaccactaactgaaacctaagtatcaggttgcccatcttgtgttgctgtaatataatacgcagactgagtaatttataaagcaaagcagcctatttcatggttctggaggataagaagtctaatatcaagatcccggcatttggtgagtctttttgctgtatcatctcttggtaaaggcaagtgggtgagtgagggcaagaggttgaacttgcctcaacctcaagcccttttataatcagtattaatccattcataaagttggaacctccatggccagccagccattaggattcacttcccgatatggttgcattgtggattcagtttccaacacacgctttttggaggacacattcaaaccacagtacaggtactttatattagctttataatgactctcccaagaaaacagtgccacgtacaagatgaggaactggagct

SEQ ID NO: 481788 - DNA, 1000 bp, Homo Sapiens
tgccaagcttttaaacaatgaaacttaacactgtacttaaagggctgttctgctcaaatcataaatgtgcacgctagttgttcaccagtaattaaaactactcgtacacatttaatcaacattttcacaagcgttttgccttaactaaaaatttgtatcaacatgaagtcctagaattatactgcatgagcccccaggatttggagaacatcattcacccttcttaatccaaaaacttgggtgcctgaaggtggggttttgatcatggccaggcttcaaatttaggtcaggctctggtggtacatccttatatgcttggtgctcagcacaggtcaagacacacaatagaccctcaataaatatttgctgaatttgaacaattcctgtaaaaatctcattaagagacatcagcttgggacacagttcctctcttactgttccttctcccagaagctcctggaatgagcaggtctggcggcagggggcacacagggctgctgctcaaatcggagaatggcacaaactccaaaagggagctggatttagacctcccctccccatgtagataacgggattcctaaggtgcagagtgggagaatgggtagaggaagcaggtttcagagactgagaacctactaaactcctaagagaactttcccttgcaaagagaatgcatgaaaaaagaagggagaagaggagagaagcctcccacagctgttagcctggaacagccgctctcacctcagttcatctggggaaggggctacaaagcaaacaatctttattcacaattggggtggcagaggggagatacccccaggtcagtccaaaagcaaagatactgggagggaagatggcgctgggcgaggaactcagcactcatcctcacccagcagggcataagggtttcggccagccaggctggaccctggagccgaggttggggtctcctcatccccttctccctcctcatccgcatcccggtcctcctctccctcct

SEQ ID NO: 481789 - DNA, 1000 bp, Homo Sapiens; identical to SEQ ID NO: 308547

SEQ ID NO: 481790 - DNA, 1000 bp, Homo Sapiens
gaagcaacagcaaaaggaagaaatgagatgttgcaaaaaagatggaggagggttcccctctcctctggggactgactcaaacactgatgtggcagtatacaccactccagagtcaggggtgttcattcttttttgggagtaagaaaaggtggggattaagaagacgtttctggaggcttagggaccaaggctggtctctttcccccctcccaacccccttgatccctttctctgatcaggggaaaggagctgagtgagggaggtagagttggaaagggaaggattccacttgacagagtgggacagactcctccagagtagagcttggagggagattgaaagtggagataatactgctgacacctcccttgaagctgagatgggaaatggacatacttagaaatttagtgactttaatagcctggatttccctctccaaaacttttagaatggaaaatcccatccccttccttatatagtgacttctacccactaccttctaccattttctactttgggcttaggatgatggccattatctacatgtgttttcagcacctggttggttctaaatgggatctggagacccagcttcttggagatttttaagaggaagtattaactggacaaatggaatgggcaccagaaagaaatacagggtcacccagaatggcagaaacctaggtttcccagagtggaaagagagaggagacattcaacaaacaagtatttattgagcgcctactatgtgccaggcactgttctagaccccccccagaagaaaaaacaaaaaacaagatagaggcagcaaacacaaattctgagggagaggaaaggggcagttgagtaagacggctaagggaactgagaagcctgaggtgatgggggctctgccttaggcctcctcttcggcctcctcaccgaaatcctcctcctcttctgcggtggcatcctggtactgctgatactcagagacgaggtcgttcatgttgctctcagc

SEQ ID NO: 481791 - DNA, 1000 bp, Homo Sapiens; identical to SEQ ID NO: 308548

SEQ ID NO: 481792 - DNA, 1000 bp, Homo Sapiens
gggtccaatttcacagacaaatgtaagtctaaattagactctgctttacagattcaggagttgggattggattcagcaccaagatcactagaaccagggcagggagagagggcaggagagcagagcagaaaaggagctctagaagcagggcaggaggtgaatggctctgaaaatttgtctcagaatgcacagagacccccgtgtgcaggggccaccctgggcgatgtgtgagcctctgtggtcacagctcccactggacaagtttccgctgaagggacaaggacaatggggcagtgaaggtgacccagctgaggactaaccacataaagcccatgatgggctcaacaacaactgggcacaggccctgtccacactcggccccccacagccttctccacaccccacctgcaacagactcagcacagcgaacatgcagattctggaaagttctcaggtctttatttgctctctcacattccaggaattgacttatttaattaatccatcaacctctcatagcaaatatttgagaaaacaaatttatattcagattcttattttcagtagggaagtaagaagttgcagctcagtgcacataaagttgagacagagatggagacatccagccccacccctctggaacaggaaagatgactggggaggaaacacaggtcagcatgggaacaggggtcacagtggacacgggggtgggctgtctctccacctcctcacattatgctaacagggacgcagacacattcaggtgcctttgcagaaagagatgccagaggctcttgaagtcacaaaggggaggagtgaagaaatcctgcatctcagtccctcacaagacagctgtctcaggctacagaaaacaacagtcatgaacaaattctggttagtcatggtaagtgatgacactctaaacagcccaccacacacgcgaaacatcccaatcaaagaatctccattacccaggcctttcccctctgccccctcccca

SEQ ID NO: 481793 - DNA, 1000 bp, Homo Sapiens
cccctaaaacttttacaaaggttctgggttctttttccacttaagtgggaaaaagtcagctaatgaggaacgtaaagtctttggcctcatctaaaggtgctttggcccgcaagtgtgagaagcactgaccgctgggaagtcctcactgcctggttcctggactcttacaccatggcagaggccatcttccctcccaatgcagagtgatatccagatagcgagctggctagcagctgtccactctccagcaatcctgccttctggggcatggttttctaaggaccttcctgttcctagatgatcaaaattgggaccagccactcccttctgagccactcctgcctctgggcctgtggctatgtcacagtccagtcacaacaggacatcccttcagaacaccctgcaggaagctgacatctctatgcagactcacacatgcacggtgtgtgcacaggcctttggttctacttcaggaggtgttgggggaggctcactagtccaacagaacttgaggccagttgtaccagtgtcatatcccaggagccaaggttacaagggatacaaagtgcccagacctaccagagaaggcaaacccctacagcatgcagggctagacaggggcaagaaacaaggtcattctgggccagcaagaagagggaaagggaaatgacaggcatacctcggagatactgaagatttgtttccagaccatagcaacaaagtgagtcacacaaactttttagtttcctattgtgcataaaagttatgtttgtactatattgtagtctgttaagtgtacagtagcattgtgtacaaaaaactgtgtatatacttaatggagtctcgctctgtcacccaggctggagtgcagtgccacgattttggctcactgcaacctccgcctcctgagttcaagccattctcctgctcagcctcccaagtagctgggactacaggtgcccatcaccatgcccagctaatttttgtatttttagtagag

SEQ ID NO: 481794 - DNA, 1000 bp, Homo Sapiens; identical to SEQ ID NO: 308553

SEQ ID NO: 481795 - DNA, 1000 bp, Homo Sapiens
gatctgaaagatgcatggatggtgactcccatcacatctccattttatcacctgcttggcctgtgcaaaagtccaatgtacctgggaagttgatagtagattttcataaacttatgaggtggtaatgccaattacagtgctctcctggatacaatattttattggggaaaatcctcataaagctgacacctggtgtgtggcaacaggcctgcttaatactgttggtcatattcttgtaagtaaggaaaatcagaagcattttgcatttatgtagcaaggaaaatagcatatgtttacttctttgctctttctctctgttataccactatctgaaggacttttgatcatcttaatatcttttataacaccttacctatccattatattgatgatgttatgctaggtgatatagtaagaagtaagtagcaagaatccctgctgctttgctgttagatatgtttccaaaagtgtggtaaataagccctaaaaatttaaatcctaccttattggtaaaatttctaagaatcaagtggtatggagcatgtaagtatattcccattaaagtacctgaaaacttgcttcactttatactgcccatcaaaagaaggaggcacagtgcgtggtgagagccctaaggttttggtggcaacatattctacatgtgatcattgttctctgcccattttttagataactcttatggatgccagtatgattgagacctagggcagaaatttctacaacaggtccagactgagtacaagctagcttactgcttggatcatatgccaaagatccaaaaatactgaagatattaaggcagagagatatattctaggagcatctgaaaaatcccaaagaagaatcatagcacaagacatctagagttatttcctccctgagcataggagaaaaatgcagtgacatggttaatgggtaagcctgcatggtctgctagaccaggctgacgttgatgactttcacattaccactccactaa

SEQ ID NO: 481796 - DNA, 1000 bp, Homo Sapiens
gatcctgtgaccccaagaccgccatgcaggtcatgagctctttgtgtcagtccattttgtataaccccttccctgctgtcagcggtgactctgtgacttctgggcggggactgagctgtatgacttccaattccatgtgacctccattccaatgaagactttgatcatacaaccccaaggcagggccaagctgtatctgtcctgtttgttttcagggacctgctgttgctggacccaaaggagaaaaggtaagcctggtatggggcaaggggaggtttctacagggttgaggtctaggtcatagggcctatctatgggacttggggggtcacaggacttgctgggtcagggggttaactggagcctgggactagcactgatggtctttgtcacctccagggagatgtggggcccgctgggcccagaggagctaccggagtccaaggggaacgggtaagtgaagcgaagtgtttagggggcagttggtgaaggttgtcttcctgacttcttatccttccatccacagggcccacccggcttggttcttcctggagaccctggccccaagggagaccctggagaccgggtgaatcaatgtgggaatggggagtgtgacagagggagatgaggtggtgggaccctgactaagtcctgccccccttctgtccccttcagggtcccattggccttactggcagagcaggacccccagtgagtacccgttaccctgggcaacctcaaggcttctggggtcccctccccttgagaactgcttgcttcgagcgtcctgcatcacctccctcttgcctcctccacagggtgactcagggcctcctggagagaagggagaccctgggcggcctggccccccaggacctgttggcccccgaggacgagatgtaagaggctggagtcgggggagtcatggcgggtaagggagtagggctgttgccagcatcatgggggttcttggaaccagggctgactctcatgtttcaca

SEQ ID NO: 481797 - DNA, 1000 bp, Homo Sapiens; identical to SEQ ID NO: 308554

SEQ ID NO: 481798 - DNA, 1000 bp, Homo Sapiens
tgctcttcagaaatttgtttcaatgaagaaactggggtatacacacccagtgaagtattgttcagcctaaaaaggaagaaactcctctctgctgcagacaaaatggatgagattgcaggtctgtatattaaatgaaataagccaggcacagaatgacaaatatttcatgtcctcacttctatgtaggaagaaaaaaggaaaccttggccaggtgtggtggctcagacctgtaatcccagcactccgggaggccgagtcgcacggatcacttgagtccaggagttcgagacccgcctggccaacatggtgaaaccccgtctctacggaaaacacaaacaatgagccgggcgtggtgacgcgtgcctgtagtttcagctacttggagggctgaggcccaagaagggcttgaactcgggaggcagagcttgcagtgagcccggattgtgcctgcgtactccaacctgggcaacagaaagagactccatcacacacctacacacaaaaggaatctcaggaaggtggaaagtataaaggtggttagcagacgctaggaagacaaggggtgggatagggaatgaagacaagtggataattgggtcccaaaatagagaaagatggaataagtgagttctagtgtttgatactacagtatgaaaattttagttcacaagaattgcttgcatatttccagatgctttggtaagaagcttcctaactttctcattatgctggtttttaagctcttctctttctgctcttgaaatcatgctggttttttgttttttgttttttgttttgagatggagtttcactcttgttgcccaggctggagtgtcatggtgaaatcttggctcaccgcaacctctgcctcctgggttcaagcgattgtcctgcctccacctcctgagtagctgggattacaggcatgcgccagcacacccagctaatgttgtatttctagtagagacgggggtttctccctgtcggtcaggctggtctt

SEQ ID NO: 481799 - DNA, 1000 bp, Homo Sapiens
gaattcctcaagtgagttctgttatcctggaggtccacagatccctaaggggggtatgtgaatgggtcttaagagttgtgggaacctattcaaattgtattgccaaatttgggagcatatgtatttttctggtaagagcagctatagcttttgtcagattttcagaagggtctataactcccaaaagttaagaaacaaccacttaatttaattcaattcaatttaatttttttgaggcagggtctcactctgtcacccaggctggagtgcagtggcgcaatctcagctcactgcagcttcaacctccctagctcatcctcccacctcagcctcccaagtagctgggactacaggcatgcaccaccatgcctggctaatttttatttttttgtagagacaaggttgcactctattgcccaggctggtctcttactcttgggctcaagtgatcctcctgcctcggcctcccaaagtactgggattacaggtgtgagctgctgcacccagccaagaaacaactgctttaatggaagaattgtaggtatctaccacagcctaatgaaatatgtatttggaggcaggaaggtcttttggacacttcccccaaatcatgtagctggatgttctcttgattgcagagaataactgaggggacagacctcaggctttcctgaatacaccgtacccccagaggatgggaaggtaatggggttccgtgataattggagaggctttgtgtctgtgccctgtgtatgcatactcaggctctcaaaatcagtgaccatttaagtggacagaccttagtacatgaaaacaaagtattcactccaggactttaggcaactctcaccagccaaaaaccattttcccagcccctacccaaaaagggccagacagtctggagacccttgtttttgtgtctctaatcaccagctcagacagtgccctctgggctgtttggatggcatatcccttttccctcccaggatcactctctctt

SEQ ID NO: 481800 - DNA, 1000 bp, Homo Sapiens
gctttccctatgagaaagatgtgagtatttacagcgttgggaggacctcttggtcaccctaccccaacagtgcatcatcctgtcattccactcctctagctcattgaggccatccgaagagccagtaatggagaaaccctagaaaagatcaccaacagccgtcctccctgcgtcatcctgtgactgcacaggactctgggttcctgctctgttctggggtccaaaccttggtctccctttggtcctgctgggagctccccctgcctctttcccctacttagctccttagcaaagagaccctggcctccactttgcccctttgggtacaaagaaggaatagaagattccgtggccttgggggcaggagagagacactctccatgaacacttctccagccacctcatacccccttcccagggtaagtgcccacgaaagcccagtccactcttcgcctcggtaatacctgtctgatgccacagattttatttattctcccctaacccagggcaatgtcagctattggcagtaaagtggcgctacaaacactaatgctaactagtgtgtgtttttatacgtccagtctgggaatgtggggggcacagaagtccggtcagcccagcctttgtaccgccagggtggctgtgctggctgggtgggctttctggacagctactccttaggtcagtgagctcctctggcatagccaaggcaaggaaaatgagtcccacagtagaccctgcctcgtctttcccccaccctacccaccactctcctcactcacaaggaggaaataaccccattctggtgagtggccttaggaattagttcgttctaaataagaatgatctggtcgtcaaagggctctcagatctgaatccagcttcccgatctcccccaaccctgaagctggagaactggatgtctggctcctcatccaagctttctgaagattcccagccactccctccaggaaaagaggaattgagtgtaaggtgagca

SEQ ID NO: 481801 - DNA, 1000 bp, Homo Sapiens; identical to SEQ ID NO: 119962

SEQ ID NO: 481802 - DNA, 1000 bp, Homo Sapiens; identical to SEQ ID NO: 308560

SEQ ID NO: 481803 - DNA, 1000 bp, Homo Sapiens
cctggaggattctactgggtagtgtgtgggaagcgtagctccctgaccactcttcctagcatgtctagaagcggttattctgaacagctgggtccttcctcgggtatgggggccagcttgccgccctgtcttacaagtccaacagtagaggcgactcctgttgcagattcacgcacaggtgcccgaggactgagaaccagagcttgaaattcaaagctgcgatcccttcacagcagtaaaccagctctttggaaccgattccatcaccccaataaaggagctcttcacagcacctgtgagtctgggcgccttagagcccctaagccagcatgggccctttccccctccccaccaagaactttgcatggctctggcatatagaaacaatttattgccgggggcaataggggtaagagaagccagaaatttttgcagccagcacccaccccacccccaacttctactttacaaaagaaatttttacaatcaccagccctctgtacagagctcccccatccggatcccttctcactgtacacagctgcctggctccctctggtccctgcttcagaggaggcctgggcctgtggccagctgaccttggagttggtctgagcccggagctcgccttggtgctgggcaccagtgggcccctgccaggcctgtcctctcctttttgagctgtcctcagccccatctcccttagagtgctttgtgggagctgcagtgggggcggggtgggctatcagccccagtcctgctgccgtcttggcactgcagtgggcagtgtctggtcaccacttccccctcttgctccagtccttgggagtgaagtgcagacacttggagtcgatccgcaggagccgcttgagcatggcccgctcatggccatccacgatgtcctctgacagtgtgaggatgtactggccctgggcagaggagatgggttcagcaggtggtcagcccacagaggactgcactctgcatcccacacacctgt

SEQ ID NO: 481804 - DNA, 1000 bp, Homo Sapiens
tgacacttgactctctgagcctcagtttctccacctgtaaaacagaggtgaccacagcagcaccacccaccacaggggtggagaaaaggccaccagcaaagttgccactgcagggtgaacctcatgagagttccacactccatgaacaagcaggacgggaggaccttgggcctgagatgcacgcgagtccccacctgagcaagatgaaaggctagcaggaaccggagatgcagccttggatgcaaaacccacagcgcgcccagtaaggttgccaccccaccaagaaaacaaaagctgttccagacactctcaaaattatcagaaaagaaatgagctttgaacgggagtgagtcagaggaaagctgatttagctcctctcatctctccatttccccgaacagtatggaatcagaaagggctttgagctgcaggaatcttctgcacaaaaatacatttgtgattcaacaatgaccaggcggatgcaccaagctttcttgtatttttagaaaaatcaaataatcttacttcaagttcgtgtcatttttacatggcaattacttttaaataccttatctaatgttccatagatttccaaattcacgttttgcttgacactttgtatttctaaatgtattttaaatatcaaatattttatttcactgatttctatttaattttatgaatcctagcttttttaaaaacacaaaacataccaactcagagtgactttctgaaattaggcaaagtgaccgaggcacttggcaacactccttcctccagcatcactgtcactagtgccttctgtcattcaatcctcacaactcagggtgaggaatccccccatctccagtttactgataaactcaggcacagaaaagtgaaatgtctcgcccaaggccacacagttacacgtggcccaccaggaaagaactggctggagtcctagttcctgcctggtggccactacattcccctcactaacagctgctcactgacccta

SEQ ID NO: 481805 - DNA, 1000 bp, Homo Sapiens
atcaacatcatttctggtttgggccataggttttcagaggcttataattaatacacatgttcaaaaataccttttcaaggactcaggatgagcatgtgtcatgagtatgtaaaaaaggatggaagcaaggagagtttgtagtttctaaaataatgactcccatgacaaagaataaatatgttttattttatgatctgaactggcttcttcccaggagccgtcatgagtctgattcaacaaatggctaaggtaggagtcaagatggtgaccttctcattgtaaaaggaaaaattaaacaatgaacaacaaaataaaaacaaaataaatcacaaaaaaaggggaactgatgcctgaccaggcttagatgttgagacttaaaaaacataacccactggactgtaactcctgtactcacaagcagccagctgattcctaccgtcgtctgagaggtggcttggacaggttaggagtaaacagcctgggttcaaatctcgcttccacttttccctatcagtgaatcttgggcatgtggatgagtctttgtgtgcctcagcttccctctctacttctaatatggggaaatcaacagtatctccttcatggggttgatgtagagttagggataaaatgcttaggagtgcttgggacacaaatagagcttagcattgttatgacttgagtctgtccattaggtcctaaaccttcttgatctcagcacattagacccagatgaaccaaggcatgatagcgaagggttaagtgttttgaacagaatgggtccagattgctgctttgtattatctgcgtggctacagataagttacataacctctttgagctcttctatttccttgtttgtgaaatagggttaatagtagcattcctcccagagatcctctggggtttgcgagataacccatggacaggactggcgcctggttgtgaaggcagcagaagctggttcccaccgtgtccccatcaactgggcagaattcctggg

SEQ ID NO: 481806 - DNA, 1000 bp, Homo Sapiens; identical to SEQ ID NO: 119963

SEQ ID NO: 481807 - DNA, 1000 bp, Homo Sapiens; identical to SEQ ID NO: 308562

SEQ ID NO: 481808 - DNA, 597 bp, Homo Sapiens
tcacatgagggtgcatttgcccttgacgcggtctgtcctcttctgcttgccggagcgcttgccgtcgatgttgaggctcatgttccggcgcgtctccagcgtcagcagctcctggaagagctccttgacgttgtagttcatcttggccgaggtctccatgaaagcgcacttccactcctgggccaccgcctgcgcctcgcgcgtgtccacctcccgctgcgtctcatcgcacttgttgcccacgagcatcacggggatgtcctccacgctgcccttgatctgcacgatgagcttgtagatgggccccagctcctccagcgactgcttgctggtgacggagaacaccaggatgaaggcgtggcccttggagatggacaggcgctgcatggccgggaactggtggctgccggtggtgtctgtgatctgcagcgtgcacacgctcttgtcgcagctgatcacctgccggtaggtgtcctcgatggtggggatgtaggtgtcgcggaacgtgcccttcacgaagcgcagcaccagcgagctcttgcccacgccgcccgccccgaacaccaccacgcggtaatcgttactctgttccggcat

SEQ ID NO: 481809 - DNA, 1000 bp, Homo Sapiens
ctgcagacctaaaccttccctatttccagggtttcactgcttcctgtgactttagggaggaggtctgaggttgagacagctctgaggagcttcagagcacgtgaggcactggatgcgtgagaccttgaggggggaattgtgtgcacatgggcttggggctgtttgtgtgtattgttgtacatgtgtgagtgtgtgttgagtgcttgtatggaaaccagcaatccagtatggaaaccagaacccagtgcttgatgttctcagcatcctgccactcggggggggctcagcccctacctccccagcctgtctccaggtttacctctgcctactccccactgaagaacattggctcgggctgaccccggagactctgggtgaggagttgaggtgcttggtcatggacaaaaggtcctctgtaaggggtcctaagctgtgttctaggacaccggggggtccacagagattgagcactaatatgatcctcttcccctgccaggtcttggattgtatgtcaccattccccccaccacccgagtccctacctgaccactgaagctaaggttgctccaaccccagtcaccattacaacactccattttattttcttctaagaattatggttatctgatatcatcttggctatctgcttaagttatgtcagtgttgcaaagtcattaagaataaggaatctagctggggtcagtggctcacgcctgtaaccccagcactttgggaggctgaagggggcagatcatctgagctcaggagttcaagaccagcctgggcaacacagccaaaccccacctctaaaaatacaaaaaattaggcgggcatggtggcgcatgactgtaatcctacctactcaggaggctgaggcaggaggattatttgagcccaggaagcggaggttgcagtgagcagagatcgtgccattgtgccccagtcagggcaatggagtgagactctgtctcaaaaaaaaataaaataaaataataaaaat

SEQ ID NO: 481810 - DNA, 1000 bp, Homo Sapiens
gagagggagacagaaactcagggtcgggggacagacccagagagagatggggggccagagatccagaggggggggacagagacccagagagagggggccagaggtctgggtgccaggggtggaaagaggcccagagaaagagggccaaaggtggggtgggaacagaggctcggaaagcaaagacccagagcatggggacagagacccagagatgggagggggtaaagacccagaggggggtgccagagaccctgtgactgagaacccacatcctctagcccccttgtcttcgctccgcctgtgtctaaggtcactgggcctctgagctcagcaccttcttccggcagttcctctccaggggggccccacccagctgtggggccagaccaggttcctcctcctctgccctgccctccagcctctcagtcgccagccaggtcccttcctctctgtcctcagcccagctcaggaggcctctcccatgggccctcgccctggtgtcctcagcctgccaccctccagcgacctcaccaccaggctccagagcccttcctgctcctctggtcctcccatccctcctccccccactcccattctccagctcggtaaaggtatggcctcctgaggtcccacgtgtgacatgccaggctgtggtccccgggccgcggaggcttgctctgcagccggccgtgctgttcttcccttacccacacgcctgcttgggcctcacaggccgctgcctctgtcccgtacagatcatcctgggctgcgacagatgtaccacctatcaccctcgtttcccgtgagctcccttttcctttcccgtgagctcccttcttttcctttcccgtgagctcctgcaggtcaggcccaggaccaactcatccctaacccacagaccccacagggcaccccagaaaaagatgtcaagtgagtgcagagagccccacgtccctgagtggcccaagcaggtatctctaggccagcagacggcgggccc

SEQ ID NO: 481811 - DNA, 1000 bp, Homo Sapiens; identical to SEQ ID NO: 308563

SEQ ID NO: 481812 - DNA, 1000 bp, Homo Sapiens; identical to SEQ ID NO: 308564

SEQ ID NO: 481813 - DNA, 1000 bp, Homo Sapiens
cgtgtggctggttctgccttttatggactcagagtaaggattatgtgctgattggtttgtgagtatgcaaaaaaggttaaacaaagacaccactccaaaggtgggcatgatagtgaagaaaaccaattaggaaagggtagatatatataaaataggtgaagggtaagcaccaatcagaggaaagcaaaccaaacgggaagacaagttctcaatccagtccgaaaatttaacttgtagcttggctttcaggctttaaactgtctccagcttggagtggggttttaccacaggcccacccctatctgcctaggcatttggcagctgcctgccactctcattagggtgaccaactcatcacagtttgtccaggagtttccttttggttgcctgtgcttgtggggtaatatttaagaaatctttgcccagaccaatgtcccgcagagtttttccaatgttttcttgtagtagtttcatagtttgaagtcctggatatgtctttaatccactttcattttatttttgtgtatgttgaaagatagaggtctggtttcatttttctacatatggatatccagttttccaagcaacatttaataaagactgtcttttccccaatgtacgttctcagcacttttgcaaaaaatgagttcattgtaagtgtatgtatttgtttctgggttctttattctgttccattggtctatgtgtctgtttttatgtcagtaccatgcttctttggatactacagttctatagtataatttgaagtcaggtaatgtgattcctccagttttagtttgttggtttgtttgttacataaaatagccttggttattctgggtcttttgtggttccatataaattttaaggttgttttttctatttctgtgaagaatgtcattcgtattttcataagaattacattatatctgtagactcctttgggtagtatggacattttaacaatatagattcttcaaaattggaaggattccaaaaa

SEQ ID NO: 481814 - DNA, 1000 bp, Homo Sapiens; identical to SEQ ID NO: 119964

SEQ ID NO: 481815 - DNA, 1000 bp, Homo Sapiens
ggatccacactgtgagttgaattcacacatcacaaagaagtctctgagaattcttctgtctgggtttataggaagaaatcccgtttccaacgaaggcctcaaagaggtccaaatatcccattgcaaattctacaaaaggagtgtttcccaactgctctatcaagaggaatgttgcacactgtgacttgaatgcaaacatcacatagtagtgtttgagaactctcctatctagagtaacatgaagaaataccgtttccaacgaaggcctcaaggcggtccaattatccacttgcagattctacagaaagagtgtttcaaaactgctgtatcaagagaaatgttccaccttgtgtgtggaatgcagccatcacacagtagtttctgagattgcttctgtctaccttttatggaaagatattcccttttctaccataggcctgaaagcgctctcaatgtacccttgcaaattctacaaaaagagtgtttccaaattgctctatcaagagaaatctttatctcggtgagttgaaagcacacatcacaaagaagactctgagaattcttctgtctgggtttataagatgaaaacccgtttccaacgaaggcctcaaggagggccaaatacaatcaagctgattctacaaaaaaaagtgtttccaaactgctctatcaagaggaatgttccactcggtgagttgaatgcaaacatcacaaaggagtttctgagattccttctgtctagcttttatgggaagatatttccttttctaccatacgcctcaaagcgctcttagtatacacttccaaattctacaaagagagtgttactaaactgctctatcaaaggaaatgttaaactctgtgagttgaacacagacatcacaaagcagtttctgagaacacttctgtctgccttttatgtgaagacattcccttttccaaacaatgcctccaagggcccaaaatatccacttgtagactttacaaagagagtgtttca

SEQ ID NO: 481816 - DNA, 1000 bp, Homo Sapiens
acaaacattgcagttgtgatgcagcatcaggtgcttttacttcagtgaatgaaaaataatggtcacaactcaaatgaatgggaatttaatatgaatatatgcaccttaccagagatgtttgctaccaatgatatcttagcaattccatattccttacaaagtcagtataattgttgtaaaaaaatcaactgtggttctgaatacccattcacagttgacctcaacaatgtatctgatgtaggagactgagtatccgtgacaggcagaagcatgtgatggtcctcagtcccaagtggaagagctaatggtaaagtcatatcagaaggcttcacatccatagtttctgataaaggacttttttgtatggaatcctgttcactcaaagtatgatcctctgcactggagtctagagttttatctgcacctagaatggaaggaaaaaaaaatctacattatctttaaaacaaaactaaacccctgaggtagactaatgtacttaccattcccagaaattacattccaaccaccatacctttactcaagcggtttctcttttgtacatatgccctcctcactatctatgtaaattcaatctgggcctcaaggttaagttcaagcaccaactccatttaaaaaaatggacttgattaagaatgaaacagggtgagctgttatatcggcttaatcacacatttgtcaattttcatatactgccttgtggcatctatctctcttattgccatttaacattctactcaggtatgccttgaatcctcaaccagactgtaaattctttgagagtaaatgtcgttatacttctttaactccctcaaaatattaaacagtgataagaaatactcttttcattcactgaatgtttttaataagttgttcatattattctgtgagttcagaacagtatgtatggcactttcatatattttcagaggtgagaaattctgctctactcaagggagcaatcagcacactgactaaagat

SEQ ID NO: 481817 - DNA, 1000 bp, Homo Sapiens; identical to SEQ ID NO: 308566

SEQ ID NO: 481818 - DNA, 1000 bp, Homo Sapiens
agctgggaccaaagatgcatgacaccatgcccggctaatttttggtagacaaggttttgccatgttatgcaggctagtttcaaactcctgggctcagtcgatccacctgctttggcctctctcagtgctgggattataggtgtgagtcaccacgcccggctcacctgcctgtttctgaagggcaccataaggttacttctgacctggcctcaacagaacaaggatgagctccattctcttgacaagagaaccattcttaaagcaagatacctggcaagcccacttacacacctttcccatccctgattcaggggggcccagtccctgcagaaattccttttctggcccaggtacagtggctcacacgtgtaatcccagcactttgggaggccaaggtgggaggaccacttgagcccaggaattcaagactggcgtgggcaatgtagcaagaccttctctacagaaacaaattaattaaattaatttggcatcacagtgcgtgcccatagtcccagttactcaggaggctgcggctggaggatcgcttgagcccaggagtttgaagctgcaatgagctatgactgaaccattgcactccagcctgggtgacagagcaagacgctgtctttaaaaaaaaaaaaaaaaaaaaaaaaaaaaaaaaaagtgaatgggaccccagccagtcatgctttggcgtctgcaatatgaatggcagagaagccctatgggaccaaatctgggcttcagggacccctgggcatgcctcctttagctgattttctctggcaagaccaagtagtctgctgactcaaagtccaggatgctgccaggggtagagatactgccctaagccacagtgcctctacaggcctcttatccactgctaaaccatacacctgggaaacagggaccatttaacattcccagctaaatatgccaagtgacttcacatgtttatcttaaagatgtccaaaacgcaactgattttctcccctaaacc

SEQ ID NO: 481819 - DNA, 1000 bp, Homo Sapiens
  misc_feature (186)..(186): n is a, c, g, or t
gggccccttccaagtccaaaattcggcccccaaaggattgctacttttatgaaggcgggaactgtcgagttttattcaaaaactattttttttgtgtgggggggcgcgcctcaacaaaaaagtgccctttttactaaaaaaaagttggtgtggagaattttttatggattcacaaacccccttatncgggaaacatggcggccttcaatctccaattttttaaacccttattaggtgcttctaaatacttattaaattgcttaaaattaaagctacagtcattattaagtgctgacaatgccgcagaggactggagctctcatgtattgctggtgaaatggcaaaatggtacagcttccttggaagccaatttggcctttgcttagacagttaaccatatatttatcaaataactcagcaatctcattcttaggcatttatccaagggaaattaaaatttacattcacataaaaacctgtatgccaatgcttatactggttttattcataattaccaaaacttgggaacaatccaagtgcccttcaagaggagaatgaataaacaaagtgtgatatgtccacacaactccactcagcaataaaaagaaacacaacttggatgaagctcaaatgcattatacaaagtaaaagaaccaaactcaatggttccatttatttgatatgcttgaaacaggccaaaatgtaaaaacagaaaacagattgatggttaacaagtgctgacgggaaaaggaagcagccaaaggagtttttgtggggtgatagaaatattccagatcttgatttgctgacaattacacaattgtatgcatttgtcaaaactcatagctctactcaccatttctggtgaaattatacctcaattaaaaatacataacataatagctttgagcaatctgcaacagcactgatagtgtttacaacatattgttacatttaggaaactacaaagcaagagatacactctgagcacaattatgta

SEQ ID NO: 481820 - DNA, 1000 bp, Homo Sapiens
gatctttctccctagaaggcccaccactgtgagacgtgtagcctggtcttgagagacattttgctcttggctgggccctaggggacacatcataggcagaaattatatagaggtggggcatgtgggaaataattgtatttcattgcagatgttcatcatcagaagcagcaccttggagaaaaacatttcagaagcaatgtgggcagagccttgtttgtgaagacctgcacattccatgtgtcaggggagccttccacctgcagagaagttgggaaggacttcctggccaagttgggatttctccatcaacaggctgctcacactggggagcaatcaaatagcaaaagcgacggtggggccatcagtcacagaggaaaaactcattacaactgtggagaacacacaaaagcattcagcggtaaacacacacttgttcagcagcagagaaccctcactacagaaagatgttacatatgcagtgaatgtgggaaatcctttagcaaaagctacagtctcaatgaccattggagacttcacactggagaaaagccttatgaatgtcgagagtgtgggaagtcctttaggcaaagctctagtctcattcagcaccggagagttcacactgcagtacgacctcatgaatgtgatgaatgtggaaaattatttagcaacaagtctaacctcattaaacatcggagagttcacactggggaaaggccatatgagtgcagtgaatgtgggaaatcctttagccaaaggtctgcactccttcaacatcggggagttcacactggggagaggccttatgagtgcagtgaatgtgggaagttttttacatatcattccagtctcataaaacaccagaaagttcacagtggatccaggccttatgagtgcagcgaatgtgggaagtcatttagccaaaactctagcctcattgaacaccatagggttcacactggagaaaggccttataagtgcagcgaatgtgggaaatcct

SEQ ID NO: 481821 - DNA, 1000 bp, Homo Sapiens; identical to SEQ ID NO: 308567

SEQ ID NO: 481822 - DNA, 1000 bp, Homo Sapiens; identical to SEQ ID NO: 308568

SEQ ID NO: 481823 - DNA, 1000 bp, Homo Sapiens; identical to SEQ ID NO: 308570

SEQ ID NO: 481824 - DNA, 1000 bp, Homo Sapiens; identical to SEQ ID NO: 308571

SEQ ID NO: 481825 - DNA, 1000 bp, Homo Sapiens; identical to SEQ ID NO: 119965

SEQ ID NO: 481826 - DNA, 1000 bp, Homo Sapiens; identical to SEQ ID NO: 308573

SEQ ID NO: 481827 - DNA, 1000 bp, Homo Sapiens; identical to SEQ ID NO: 308575

SEQ ID NO: 481828 - DNA, 1000 bp, Homo Sapiens; identical to SEQ ID NO: 308576

SEQ ID NO: 481829 - DNA, 1000 bp, Homo Sapiens; identical to SEQ ID NO: 119966

SEQ ID NO: 481830 - DNA, 1000 bp, Homo Sapiens; identical to SEQ ID NO: 308578

SEQ ID NO: 481831 - DNA, 1000 bp, Homo Sapiens
ttactcagatctggcatcgttcccttccctgctaaccttcagtcccgaattaaacgcagacgtcttgacccgcagcccagctgctctccagcctcgctgctccctccgctcacagctccgcatcctctgccttcctcacaggcttccgtccgcacccccgtcctaccggctgacactgtccaactctccaagacccatctcaaatcctacctcccgcaaacccttcctaaatttcctcacctaggcctgctacagcgttcttattttccacatttcttttctggctctcggactactcagctgccaaagcgcatccattgctgtactccctctctgcctggcctacttcagtggaaaagcatgaggacgggctgcgctctgctcctcacacaatccccagcccagagcaccctgcttatttattgaacataacagtgcaggccggcctaggcttcccataggcaaggatgactttcagaatgttctagaaaaaaggatacttcagggggcccataactgcttgattcaaatctttcctttaaaaacataaaaacaacagttggacttctaaaacacacactgaagacatacgcgctgccacgtaagctctccacatgttcactttgccttcagggaaactgtgtgcacatcaacgtgccctgggaaaggctgcagggctgcactgcgggcagttcagatcctagagcacttgctctggcctgggagcgctgcaggcaactgaagccacacagaccctgctcctgcaagaacttttgtgtgtgtcccatggtgatgtcattagtttgcttattaattatatttatataaacttctggtcctgttttaaatgtctgagattgcaaggtcaactgttataaacctgtcatcacttccatctatgtatccaagactaggagaattctccaaatcaactgaaacataaaaatagatgttaaagttgattttaacccaaattttgtattgatcaaaacagcttcat

SEQ ID NO: 481832 - DNA, 1000 bp, Homo Sapiens; identical to SEQ ID NO: 308579

SEQ ID NO: 481833 - DNA, 1000 bp, Homo Sapiens; identical to SEQ ID NO: 308580

SEQ ID NO: 481834 - DNA, 1000 bp, Homo Sapiens; identical to SEQ ID NO: 119967

SEQ ID NO: 481835 - DNA, 1000 bp, Homo Sapiens
caccaagagagtttcttgctacttactcttccaccaaaaacagtgataatactaattattttagttattacagctgagactctgtgttccagatcccatcttaacaccttacacctgctcatcaaatcattgtgacaaccttgtaacataggtcccatcattatccttagtttatagatgaggaaactgaggcccagaaagcaagagaaccttgcccaaggtcacacagctagtagacagcagggctaggatgcaaaggcaggcagccggccccagagtccaccttgtaatctctgcactcactgctttccattaaacttcttggggatttaccgcaaatcatggttacttttctttactattatctctatatatatatcaattgactttcacttacacaagtaatatgtgaatgaatacattctaaaaaacaaaaacaaaattagggcatgactgacaaaactaaactctgcttggacattactcttattttccactgtgagtagtttggtaagaatcctctcagccttttgcctacacgtttacatatgtactttactgccactttgcatactcttcccactgggcctctagaaaacagtagctgagacggcaaacttgagactgaagaaaggttgtgggggctggagatggtatcactttctgttttctgtagatcagttacctataaatattctgaaagcttcccggcaggtgactcagccaatgggccagagagttggatgcataattaggtttccttggctatctgcagagacaaaaccagagaaggtgggctgtctctatccaatatggctgccactcaccaaatggggttttgggcccttgaaatgtggcttgtccgaactgagatgggatataagtgcaaaataccagattttgtagccttatacaaaaaaaaaaaaagaggataacatagctcatgcttttttaaaaaaaacctttcctatggtgctaaattaatttcttttctttcttt

SEQ ID NO: 481836 - DNA, 1000 bp, Homo Sapiens; identical to SEQ ID NO: 308582

SEQ ID NO: 481837 - DNA, 1000 bp, Homo Sapiens; identical to SEQ ID NO: 308583

SEQ ID NO: 481838 - DNA, 1000 bp, Homo Sapiens
  misc_feature (40)..(40): n is a, c, g, or t
ggggggcatccacgagccggtgccaggagccggccgcctnccgcctgccgcctgccgcgcccgcccggccccgcccgctcggcccgatcgccgcgccgcgcgcatggggcgcgcccccgggggggcgccgagggcgctgagcgccgggcccgcccccgccgatgcgcccagccgcccgcgccgggggtcccaggccgcgccgggcccggggctgagccgccccccgcgcccggcatgcccggcccggcccgccgcccgccgccgcccagggcccgagcccgcgcggcgcacactcagcccggcggcgccgcgtagccgagggagcccgcctgctgcgagccaggcgcggggcgtcaaggtcaccggcccgacggggcgcacgcgcggccatggaggccaaggtccgcccgagccggcgctcgcgcgcgcagcgggaccgtggccggcgccgggaggccgcccgcgacgcccgcgcccagagtccgtcgtcgggcgacgagcccgagcccagccccggcaaggagaacgcgggcctccgcggcgcgcccccccgaggcgccgcccccgcgccccgcaccgcgcgtcccccgcgccgccgccgccgcgagtccagctcgcaggaggaggaggtcatcgacggcttcgccatcgccagcttcagcaccctggaggccctggaggtaggtggacgggtgcggcttcgcaggcgttgaggcgagaacggggcccggagttgacgcgtcgggcgatcccgggacccctgggcttgcgaccgcccgcgccgtgggcagccctgagggaagccccggccacttggtacccgttccagggaccctgggtgcccaccgctcgcccagaccgtcgcatctggaagacccagcagcgtcgggtgggtttggggacgttttaagttgcagaggcaaaaaaatctacgcttcgaaattgggggctgtctgacagcaccgtcggccttttatcagttgtgtttctgtggccagca

SEQ ID NO: 481839 - DNA, 1000 bp, Homo Sapiens; identical to SEQ ID NO: 308585

SEQ ID NO: 481840 - DNA, 1000 bp, Homo Sapiens
catggtcttggagttttcttttgctgggtctccccaccaaggcttccacggagaaggcacgcgcccgagagctcagagccatccctggagggggtgaagggattctttgcagcaaagtttcaacctgaactgggttagggagggagggggagacacaggcggagggcacagagggtgaaggaaggagggaaagcgggaaaaacaaaacaaaacaaaacaaaaccccaaacccaaaacccaaatctgaaaaacaatttctggatctgtattcaaagaaaataattgtgtgtgtgtgtgtgtgtgtgtgtgtgtgtgtgtgtgtgtaatttttttatatacatatatattttttgtttgaatagacaaaatgaaaggagaggaagatcaaactagtgtatatgtccttcaaagtctagtctcccttcctcccagtgcacatgtgcagaccattagtcctcaaatccctgattccaggacctggcagagcagagattggcaagtgctggccttttagggagcagacctgccgccaatggcggctcaggttgctcggattgggagttactgttgcatccagtgaatacccagccggtcactgcctccactgtttgttttggaaactattggaagcataaaaaacacagtgagtgacacttcagagtctaacagggaggggggttttggagcttgttgaaaaaaagctatagatagggaagtagagagaggagaaaagggagatacaggttacagctttacattaaattataaaactcaaagacatgcgaaataattgcccacgagggaccactttaagcagatccggagagatgtatcagggtcttttgctctccagtgaaggcactgggaaacagaaaggagtacaagcttttggggccagttggctctgcagttggagtctcaaattaggtgagcagcagttgtgccagtttatccgctctcttctgttagtgaggtgagggcaggcaggagtctcccaatg

SEQ ID NO: 481841 - DNA, 1000 bp, Homo Sapiens
tcttacaaggctcaaacttgtgaacacatcactgaccagcacagagctggctacaatagctccccaattaaggtgttttacatgcaactggttcaaaccttccaagtgctaaattaaaacaatcctttaaagaaggaaattctgtttcagaagaggaccttcatacagcatctctgaccagcaactgatgatgctattgaactcagatgctgattggttctccaacacgagattacccaacccaggagcaaggaaatcagtaacttcctccctataacttggaatgtgggtggaggggttcatagttctccctgagtgagacttgcctgcttctctggcccctggtcctgtcctgttctccagcatggtgtgtctgaagctccctggaggctcctgcatgacagcgctgacagtgacactgatggtgctgagctccccactggctttgtctggggacacccgacgtaagtgcacattgcgggtgctgagctactatggggtggggaaaatagggagttttgttaacattgtgcccaggccatgtcccttaagaaattgtgacgttttcttcagagattgcccatctttatcattggatcccaaattatttcctccataaaaggagcttgggtacttgccctcttcatgagacttgtgtaaggggcctttgcacaaatcatttcttttcaaatctccaccaataaaacctttgcatcacatgtcctcagggtctttagaggatttagaaataaggattctaaaataaattccccatacagcacttccctttattatgttgacttatgtcagacaaaaggaggttcttactgaaaattttgtgggagtcaagggaattcaaagggtctctcctagacgatccagtgttaggttccccacaggacctttggtgttggccatagtcctcatatgtgaggatggacccagtggcctccccattatctcctttcttttcttgctgaactccaatgtttataaggcc

SEQ ID NO: 481842 - DNA, 1000 bp, Homo Sapiens; identical to SEQ ID NO: 308586

SEQ ID NO: 481843 - DNA, 1000 bp, Homo Sapiens; identical to SEQ ID NO: 308587

SEQ ID NO: 481844 - DNA, 1000 bp, Homo Sapiens; identical to SEQ ID NO: 308588

SEQ ID NO: 481845 - DNA, 1000 bp, Homo Sapiens; identical to SEQ ID NO: 308589

SEQ ID NO: 481846 - DNA, 1000 bp, Homo Sapiens; identical to SEQ ID NO: 308590

SEQ ID NO: 481847 - DNA, 1000 bp, Homo Sapiens; identical to SEQ ID NO: 308591

SEQ ID NO: 481848 - DNA, 1000 bp, Homo Sapiens; identical to SEQ ID NO: 119968

SEQ ID NO: 481849 - DNA, 1000 bp, Homo Sapiens; identical to SEQ ID NO: 308592

SEQ ID NO: 481850 - DNA, 1000 bp, Homo Sapiens
ttttttttttttttttttttttttttttttaacaagcagcataacctttatttggtcatacaataggtgaagagtgtctcaatgttttgaacactaaattttactcgatgataattttttttctatctaggcaatttattcagatatgtgctttaaaaatacacattaggaactttgcaactgatatgttctatttaatattagaaacatttttcatggtaatacattatttaactttctataattagagggaaaaaatcataaagatcatactttatattttaacctgacagaataaatgcattatatatatctctttgaaaaccagtgcacttagaaagtttctaatttatgcactccattgccctaatcaaaaagctatacattttccagtatccacactataacacagtcctagtaaagatgcacattcctttaaaccctttactttcccttgaattttgtgggggagggtggaggggaaggaaggatacagaagttgcagtgcagacctatatttatttagaacaaaacatcatatcctatgttaaaaaaataattttatcaaaaccaaatttcaatcacagttatgtatgattttcagttaatggtacatgttgaaattgcactttgcagatatcctgataatgtccttgacagcgttccccatttcagcctatgtttttttcagtagacacaggttcttccagagttttcttttggctccccttccgtgaatatttgtatttgtctacataggctttaaccagatttgccactttagtagaatttacttctccactcttactatgacaaactttatctactgctttccgtacaatttctttatattcttccttggtgatatctttattttggtaaaatggcttgatggccaattttacctcttgtgctgctttttcttgaatttgcaatttcttgtctgtcttcgagctatctgcgctggcttccactgcaacacttactttgctttctgcca

SEQ ID NO: 481851 - DNA, 1000 bp, Homo Sapiens; identical to SEQ ID NO: 308593

SEQ ID NO: 481852 - DNA, 1000 bp, Homo Sapiens
gatctggccaattcttagagaaaggactcagactgaagcatgtctttgatatgcaaactaaccagtgcagtgccagacctcctgtatctggccagtgcatcccaggaggcagtattcctctgcctacatcatcccaggaccaggtgccagcaacagagacccctctttgtagccaaaagcctgccagaattattcaatctagcccatccaaaaccattcaccctgccctgccttgcctttccccagaaaccccaacaaaggttatggcttaaatctccccctcatcctatcttctgcgagctccaccctggtgtctttctcatatggaccaacacagtgtgtgtgccccttgtccctaggacctgtgagtataatcggcttcttttttccctgagcctctcctgcatctcctcttgtggttgcacctgactatcttataagagactaaaaaaccgagggatggctcttagtaacggtgtctacagataagattggctttagaaagggggtttcactagaagacccatccaactctaaagattcacaccctaaaatgggcagattcggaaagtcaaggggtgaacccagggaatcccgtagtattgtcaaaattattgctgctcctggaacaaagggccaaattgttccttggatttcatgtctttctccaccccactgacaaacagcatcaaccacaacaaccataatgagaatggctgacatttagtgaagatttccccatgtcagacactgttctaagtgccttcaatggatgattttatctactcctccaaactatgaactatttatattcccattttatagaaggggaaaaagaggcacacggagtgccagtgacttgtaacttgcccagccatacagctgatgcagtgaagaagcactttttataaaccccttcctacccaaggcagctgagctgacaagatggaaaagatgaaaagcttcactcttcacatctctctggactatagaacaggag

SEQ ID NO: 481853 - DNA, 1000 bp, Homo Sapiens; identical to SEQ ID NO: 308594

SEQ ID NO: 481854 - DNA, 1000 bp, Homo Sapiens; identical to SEQ ID NO: 308595

SEQ ID NO: 481855 - DNA, 1000 bp, Homo Sapiens
ccccaaccattcccagcctgcccagagctcacttacattcatgataacaacaatggtgtgtgtctaaggataaccttgttgggactctagttggtcatgcccgtcccctcccactctgaagggctgaaatttaaccgaaaggtaatttgttccatctggacttcaggtgccaggtttgaggctacatccgatctggaaagttattttcagtgtgtgtagattctatgattagtcctcaagttatttctttagggccagagatgagtttcaccgaagctatatcacatttctggcaccccatggtaggacttagagaaagcccccaaggacgatctccatgaggcggagccggccctagggagctaatagactatagaaataactccagagccagggaagcctcgaacacaaattttacaaggagccaattgagtggttgagcagttgaaggcaggcctatcttgtttttgcttgagggcaggtttctaacataatggaaagagaagactgtaatgatcaccccctatatacctgatcttctcttaaggtccttcaaggatgtaattgattctgtcaatatccttcatatttaaggccataagttgctgcttggttcaattaaggtagaattgcttctggttaagatctcaaactaggcatctgggactatctaaaagtttctctggaaactggaatgtaagcaatgcaagatgtatggcttaacctgtagatataactcatgtcaagaaaacagtggggttgggcatggtggctcatgcctgtaatcccagcactttaggaggctgaggtgggaggatcacttgaggccaggggttcgaggccagcctgggcaacatatcaagacccccatctctacataaaaagaagaagaaacgaaaagaaaagaaaagaaaagaaaagagtggaagagtgcaggagccgagagggagagaaaatgtagtggtgaggggcagcttctggaaaggcccatactacagag

SEQ ID NO: 481856 - DNA, 1000 bp, Homo Sapiens
ccatcctcaccgcctcagcccagggaggggtggccctgagcctggaaagtgggggcttcccagggagccggggtacttggcccaaggaggatgggaccaccaagggtgggaatggaggctcaggctgggggctgggggtggattctgaacctttcatgaggacagttggcctccatatttggaagatactgttttgtttttaattatacaaaattttcagactttatattatcatatcaaaaacacaagatgccatcacacagtggccggaagaaaagccagcgcagaaagttccagtgggcccgggcaggtgctggggccagcgcagagtcccgctgccggcgcctgtctgtacgtccgtctgtccctcggccccgctcgcagccagggctggcctgggggcatgcttgcggtgggccttgcccagctcaggtccaaggtgggggctgtctgcagtcaccccgggcgtccacctcccccagcagcgtctgcctcctggctgctgccggccacctcctaactgcgaatcgctgtctttctgtcgcggtccttgctctgcagaggggagggaggagtgtcaggccccggcagagcccagcgccagtctgcgcctctctggcctccctgctgggtgccatctcaggtggccagcgccaaggcacctccttcccggctctccccagcttccctcaagcgttttggggaggggagcatactgctgcacagccgaaattgtaaaattaaatttcccagatgttcaggccccaggagctcgcgcgtgctgtctggagaggaaatggggattgggaaaagccgtgccgtattttctccctgctcaccctgcttttccggtgccaccaagcacagcaggagctgtaaatcacagctggccagcgtctcctgcaggggccctcacccccagcccccacatctcctgccagcctctgccttcgtgtcccatggcccacgtctcgggcagccctacaggacctggtgtctt

SEQ ID NO: 481857 - DNA, 1000 bp, Homo Sapiens; identical to SEQ ID NO: 308597

SEQ ID NO: 481858 - DNA, 1000 bp, Homo Sapiens
gatcacacaccaatctcttttaactagaaaataaacattgtcagtactgtctttaaataagaagagttcagatgaactaatgacagaatttttcttcagtgtgttcttaaaaaggtttacaactacaatatcatttttaaaaaacggcaacttttaaaaatgtgtgtgtatagttacatctgaaagtaagaaaaacttctgcactacagcacattttatcataaaagaatggagttgaatacaatgacgcagataactagctgaaggaaaattttaataggtataaagtgatttaagttctaattcttaaaaatatggacctgtggtaagactcaaagtttttgccacatttatttattttgtataatcaacttcatctttagctgacaataagacatcatggcaggattctaagaacaaaagatttaaaaatagaaatctaacaattttatatgagcattatcaatcatccatggcatcctgccagtcaagaacaggttcttctacaaacacacactaaaatagcatgatctggtcaataaaaagacaactctaatatccaattatgaagatacaaaacattttactctctttccacagttaattagttctcagcagaaagcacaatggaaagatacacagttaatacacagagtctaaggacaatttaaaaaacgttaacccccacttaaatagaaaagaaaatgaatattagatttctgctctttcaaaatgtgctcatctaattaattcagtctagaaaagtgatccatggaaaaatgtcgtattctatcttgggaaagtgtatttaagtgagttaagtgctattaaggccaaaatcactattccatatatattctgcagaagttatcataaatgtaaaaagcaggcaatgtaaagcagcaaaaaagttcctggatttacagtcagaaatgggctttatttctccagcttctagtactaactacacatgcggctgtaggcaaggttatttcacctc

SEQ ID NO: 481859 - DNA, 1000 bp, Homo Sapiens
tattaggaagcatacaaaataattatttctacaataactgcttattaaagtgtaaatcaatctacagaatataaacactaagtaaatttttccattaaatgaaagcttccaaaattgacaactgtttctgaattaagaaagtaaatctcccccaaatatgtcagcacaattatccccattgctatccatggggaattggttcctcaacccctgtgatgtcaaaatgtgccactgctcaagtttcttataaaagatggcatagtatttacttgtaaactacatacatcctcccgtatactttaaatcatctccagattacttgtaatacctaatagaatgaaatgctgtataaatatttatactatattgttttacctatattacttattatcgtagtgttatttttttttccctttttaaacttttattctaggtttttatttaagttgtgaaggtttgttatataggtaaacttgtgtaacgggggtgtgttgtacagattatttcaccacgcaggtatagagcctagtacctaatagttactttttctgctcctctccctcctcccaccctccacactcaagtagactctggtgtctgttgttcccttctttgtgttcatgaattctcatcatttagctctcacttataagtgagaacatgcggtatttggttttctgttcatgcgttagtttactaaggataatggcctccagctccatcatgtgcccacaaaaaaacatgatctcattcttttttgtagttgcatagtattccatggtatatatgtaacacattttctttatccgatctgtcattgatatttcccaattatttttgatctgcagttggctggatcctcaagtgtagaacccaagaatatgaaggaccaactgtatcataaagagaaagggcatgaatgctgattatgagtgcagaatgtgatgatcacatctaattttagttgtgaaagtgaagaaagccatcaacttgactatta

SEQ ID NO: 481860 - DNA, 1000 bp, Homo Sapiens; identical to SEQ ID NO: 308598

SEQ ID NO: 481861 - DNA, 1000 bp, Homo Sapiens
gatccagattacatacttaagagaaaaggacattaaaacagttactatgtctgtattttgcttgtaaaaaatgtagtatattctttttaaactaatataagactactgaacaataaaatttaaagttttgctcaataataaaatcaaaaaataagatacttaaaataaatgagcaattccatgcaatatcaccgcacaggaaactacagaacattgctggctcaaattaaaagacaatgaaatagaaaatttcttgcttattgtttggaaaaatcaataatcttaatattcaacattatttcatgttgacttataaattcaaaacaataaatatgaaaattattgctgctatttttttgaaaaattaacaaactaattctataaattttatagatatacaaatgacctggaagagcctaaaaattttttaaaagaatcacccagttaactgcatacaccaccctatttcaaggcatggtataaatctagtcatcaaaactgtatggtattggtgaaagaatagacacagattggtggaacagaatagaatccaaaaacaggcccactcataaatcttcagttaattttcaccaatggtgtcaagataattcaatggtaaaaagaaaaattttgctaaaaattatgctgaaaccatttggttctccatttgagataaaaatgaacatacacaaaaattaatttgaaattgaatctacacctaaatttaaaagctaaaatgataaaactttcatagtaaaatataaaagaccatcttcattgttttgggtaggtatgatggtaaatactgacaatattttgtctatgacttgtttgcccttacatctgagacaaaggccttttgggtactttacttaatgtcccattgcattgaaggatgcaaagaattgttcttgggtgtgcctgtgaggttgttgccaaaaaagattaacatttgagtcagtggactcagagaggcagacccaccttcagtgtggatggg

SEQ ID NO: 481862 - DNA, 1000 bp, Homo Sapiens
  misc_feature (847)..(849): n is a, c, g, or t
cctctcttcccggctggcttcctcactgccgtggagactcaggtgtgtgagggctcgtccaggctgcagctggacagagtggcagaggcggctgaggcttgggcagccaggtcccggtaagcaggcgacttcaggaagcgtgggtaggagtccttctccatcagggtacgtgtcttcccctgagccgcatcaaagcatgtggctgtggcagtctgcaggttcatcctcgtcagctcgcgggtctcatggtcaatgttgacctgcgggaaggaggacacacacagggtgagttggggaagagggtgggcatggctgagggagggccaacggcaggctgggcattggaaagagcatcggatgctgcatcaggaagtgggggctcctgagttgatcactagcttttcagctctgggcttgtacccacatctgatccagtgtctgtcctccaatctctcagaattaacatgaggatctatcaagaatgtatacaaacgcaatcccctttcaccctttcttctacagcaaccctgcttcaagtcactatcagctctcctgggatttgcaccaaggcctcctacctggtctctctgctaccttaccccccacccctgtggtttgttctctacccagtcgctacagtgagcctttaaaaacccaactcagtttggtagctcctctgttgtctcctcatgtctttcagaagaagagccaaagggcttgctgggcccacgaggctccccaagcccacacctggccatcctcctcatgcctgacctcatctcctgctcttgccctgctctacacaggtccatttgctcatccgtgactgtgacaggcaggctctgannnttccaccaggtggcgctgtgttctttagcaaatgcagctgccatgcgtttagcggccaggagagaaggtagacaaaaaaatcacagaccacagaccagcaggcctcaggcaggtcagcctggggactgagccaggttacataaggtccctg

SEQ ID NO: 481863 - DNA, 1000 bp, Homo Sapiens; identical to SEQ ID NO: 308599

SEQ ID NO: 481864 - DNA, 1000 bp, Homo Sapiens; identical to SEQ ID NO: 308601

SEQ ID NO: 481865 - DNA, 1000 bp, Homo Sapiens
ttttttttttttttttttaagatggagtttctctcttgttgcccaggcgggagtgcagtgtcatgatcttggttcacggcaacctccgcctcccaggttcaagcgattcttctgcctcaacctccagagtagctaggattacaggcgcacaccaccacgcccagctaattttgtatttttagtagagatggggtttcgccatgttggtcaggctggtctcaaactcctgacctcaggcgatccacccgcctcggcctcccaaagtgtgggattactggcatgagccactgcgcccagcctaataattctttaacaagggcccaggctttcactttgcactgggctctgcaaattaccaggcctgtcctgactggaggcaagggctgaacccatctggtgggggaaaagggccaaagaggaggtcaggaaatgcttcatagaaggaccccgagggaggaggtgagtcgtgcaggcaggcctgggtgtggctatgtgagacttgtgaggtgggagtgtgttgcgtgcgctggtgtgtgcaagtgtgtcaggttgtgaatacggtccatgcgagtgtgtgagagcaggcagcgtctgcagtgcgtgcaggggcatgtgagtgagggcttgtgaatatttatctttgtgagtgtgagtgtgtgtgactttggttcccatgagtgtgtatgaatgtgtgtggtgtgtgggggaggtagtggccagggcagggagagtcacggggccatttagcaaatatttatcgagcacctcctctgtgccaggcgctgtgcaaggtgctgaggtgagtaagccccagcacttgcccagaggtgctcacagcccggcgagagagagagatgtgtaaacagacaacagcagagagagagagcagattgaaaccagactcctcagaaatgcaaccccttcacccacttcccccaggagaagccagacttccccagaattggtgggacaggtggggctgtgggataagccaggaact

SEQ ID NO: 481866 - DNA, 1000 bp, Homo Sapiens; identical to SEQ ID NO: 308603

SEQ ID NO: 481867 - DNA, 1000 bp, Homo Sapiens; identical to SEQ ID NO: 308606

SEQ ID NO: 481868 - DNA, 1000 bp, Homo Sapiens; identical to SEQ ID NO: 308608

SEQ ID NO: 481869 - DNA, 1000 bp, Homo Sapiens
ggagccaggcaagttaaaggtcatcagtacagtgtaatgcatgccataatagggagaaagaaaggggaccttaacctctgatgcctaattcatcaaaggagatgagcaataagttgatatatcaggacacagagaagcatacactacagcagccagagtgcacaaacagaagcacgagctgtgcttgaggagcttacactctcataggacaatgatccatgtctgcacttgatctaaatgggctcatatttaaaagaaaagcattgtcaaaaaactaaagtgttttgatagtgtgtccttttatcttatttcagattcttccagaagccaatgggttttgagatacatccatgggtaaaatacttgtcacaggcattgtttggtgagtctgacatttgaacatggcaagcattgccctccgaaacctacgataaaaaaaggaaaatctggcattaacccataatgatttggaacttctaaagcattttcaaatatggctaagatgccactactgccaatttacatctctggataaatttctgcctccaactttaacatgtcctgttgagaacctttataaatatataaagtatatggtacagttaaagcccattttgcactattgattctatagatttcctgttgagaaactttataaatatataaggtatatggtacagttaaaggtcaattttgcactgttgattctacagattgaagacatctactaaaagtaaataattatatgtatttaaaaggatgctactaatgtcaagtgccatgagttgtttatttgaactaacaatgtgtatttcatccatctgttcttcctagcaagaattttccaaaagaactaccagcagattctgaatttaaaatgtgttcttcattcttcttatgtggtctgtttggtctgtaaaattttatgtttcttcacatacctgtagctaaagctgcttttccaaacattgccattccaggataaaattacctgacctcg

SEQ ID NO: 481870 - DNA, 1000 bp, Homo Sapiens
ttttttttttttttttctcatttcataagcatttattaatcagaggtacatgagcaggctcagcctaggggaataattgccaacaaacacttttgggaagcctgggaccatggctctgccaggaatctgtgacatctccagggcatcatttgagtcctgccttctcaaagtacttgtgacaggcagacgtgattgcagccacgaacacgatgaactcactgaagtccacctgggcatctccattggcgtccaggtccttgagcaatttatccacggcatccttgtcttttccactctgcaggaagcctggtagctccttctccatcagcaccttgagctcccccttggtcagggtctgcgtgctgccctcgctgcccgaatatcgggaaaagacgtctatgatcatgcccatggctgtctctagttccgtcatggtgctagattcagacccaccttcctcctgggggctggcagggccgagaaaatgtcccactggcagcctcttggtgctttataaggcagcctcatattgacacagagggtgggacagtggggttgggacattcaggaagtcctgcccctccccattcatgtgctcagttctgatgaaatgcatcgttgtgatgacgtttctggaacctttcccccagccaaggcccagggtgtgggctgcctccaggcatccacattttacagtgttcacctgtgtctcggcgccatcactgagccacagtggcatcctcattcctggccctccctgggtaagtgggcacggggtgagtgtgtgtggagtgagtggtgactccgtggccctttgtgtcaatatcagagcgtgctggcacccagcgtgctgacacgaggagacatctgagagtgaattcacatgggcgtgtttgtgaacatggatctgccccatcgtccctttcttagagcactctgtgtccttcagaggcccagcttccacgtcaatctcgctcgctcctcccctgtggggccaaac

SEQ ID NO: 481871 - DNA, 1000 bp, Homo Sapiens; identical to SEQ ID NO: 308609

SEQ ID NO: 481872 - DNA, 1000 bp, Homo Sapiens
aggtgcagcaggccccgcccactgactgctcctttggccctcccaggtggagggtcacaaactccaccctcagaagtgctgacagacaagagtcctcttgtgcaaatataaagaggtttattcattctgtcattaggatacaaaatagaacatgtaaaaggcacccctcccgtcgaccccacagttcagtgtgaacaccgagcgctcgtccagggaaggctgccatgcacggcgtggctcccggtgaaggcagccggcttgagccagcctcaggtctcgaacatggcacagctggtgcacagcactttctcgtacatgtcactgcagctgcgacagcgtcagggaggggagagaaaagctgctgtcaggggctgaattgtgtccaccaccccccaccattcaaacgtcaaagtcctaacccagaacacctcaggacatgaccttatctggagacaggatcactgcgggcatcatcagtctagatgacggcactgacatgggggccctaaggcaacacgaccagcgtcctaaaaagactacgtgaagagaaggacacagagaaggaagacgacatgaagatacagggagggggcagctgtctacagggaacaccaaagataaccagcagatgccaggagagaggccaggacaggttttccattgcagcctcagaaggaaccagccctgccagcaccttcctctcagacttctggtctccaaagccacgtggcagtacctctttgctgtctatgccactgggtctgcgaactcagttacagcagccctagctgattcccactgccgatcaatccacatggggcccaacctgggtttccagtaggatagaagctctccaaagaaacctccagatgacctgccagaattcaccgaaccacaatggtttacactgaagcacatcaaacagtgcttttctgatatatcaagactaagggtagggccgggcatggtggctcacgcgtatggtgtggcttacctcagc

SEQ ID NO: 481873 - DNA, 1000 bp, Homo Sapiens; identical to SEQ ID NO: 119969

SEQ ID NO: 481874 - DNA, 1000 bp, Homo Sapiens
gatcaaatccaagggacacggaggaggggccgccactgcagtgcccactggggctgggagaactgaatgagtgaagtgggtcaggatgacagaggccctgggcacacatggccacagaggcagctggcctaggtgtcaggaggtgagaggtgaatggggactgtggcaaatcggcagtatccttcacaggcacccaacagtttgcccgcacacctgacacacctgcctgactccattctcccatccacctgcccactcacccaccatctatccatccaccctccacccaaccatctacccacccgtccatccaccctccaccaaccatctttccacccgtccatccattcatccatccacccacccacccaaccacccacccatccatctatccacccgcccatccaccctccacccaactatctatccacccgtccatccactcatccatccacccacccacccacccatccatctatccacccatccttccaccctccacccaaccatctatccacccgtccatacactcatccatctacccacccacccaaccacccacccatccatctatccacccgcccatccaccctccacccaaccatctatccacccgtccatccaccctccacccagccatctatccacccgtccatccactcatccatccacccacccacccacccacccatccatctatccacccatccttccaccatccacccaaccatctacccatccatcaatccactcatccatccacccacccaaccatccacccatccactcatccatctatccacccatccatccaccctccacccaaccatctatccacccgtccatccactcatccatccacccacctacccacccacccctccatctatccacccatgcttctaccatccacccaaacatctatccatccttcaatccactcatctatccacccacctagcatccaccctcccaaccatccacccaccaactcatccat

SEQ ID NO: 481875 - DNA, 1000 bp, Homo Sapiens
cacttgtccatgcaggctctgggggtgccacctgctcctgcaggcaaagctaggcagtgcgatacacagaggtcttggttttatacagaacctttaattgcaaagaacgtgaaagcagccacgctgggggtggcagtggagtggagaacccaccacaccctcccctcagtattcttcaccttcttcagcctcggcttccacggaatccacgcccacctcttcataatccttctccagagctgccaggtcctcgcgggcctcagagaactccccctcctccatgccttctcccacgtaccagtgcacaaaggcccgcttggcatacatgagatcgaacttatggtccaggcgagcccaggcctccgcgatggccgtggtgttgctcagcatgcacacagcccgctgcaccttggccaggtctcccccagggaccaccgtggggggctggtagttaatgcccaccttgccggagaaggaggaagaaacagtccatgaagcttatatcaaacctggaaatggtggctgcttttcctccaaaaagaagacaccctgtaggtgaacaggagaattcatgtggaaaaggtaggttgaacttagtaattttatgggcatttgggggaatcttgtaggtggtgtatatattttattttaacttgggcattactataaactgcttcacaacatcattcgttccactgtctcatgtagggtttgatttaaaaaaagaatgagttgtttgtgatgaaaacagcaccaggtgcagtggctcacacccattatcccagctctttgggaggccaggtggatttctgaactgagtttgagaccagcctgggcagtatggcaagaccctgtctctaccaaaaatacaaaaaaattagctgggcatggtgtcatgcacctgtggcccttggtcccagcgtactcaggaggctgaggtgggaggattgcttgagccctggagggcagaggttccaatgagctgagatcctacccactg

SEQ ID NO: 481876 - DNA, 1000 bp, Homo Sapiens; identical to SEQ ID NO: 308611

SEQ ID NO: 481877 - DNA, 1000 bp, Homo Sapiens; identical to SEQ ID NO: 308612

SEQ ID NO: 481878 - DNA, 1000 bp, Homo Sapiens; identical to SEQ ID NO: 308614

SEQ ID NO: 481879 - DNA, 1000 bp, Homo Sapiens; identical to SEQ ID NO: 119970

SEQ ID NO: 481880 - DNA, 1000 bp, Homo Sapiens; identical to SEQ ID NO: 119971

SEQ ID NO: 481881 - DNA, 1000 bp, Homo Sapiens
ctgcagaagtagttctgaaaaaaacacaagaaacacctcaaaagccaccggtgctttagtaaagcacctccgcttctgccatctccccacaatgaggaagctccagtaccctgtccacatttctaaatggcactcatcggattcttaatgagttgcaggctttcccaacgggactgtgtgacagagccacgctcttgctcatctgcgtaatccccacactgaagtggagttgttcatgaaaacttactaaataatcaaatttcatcctctcaagcaggatatgcagtggtactttgctacaaatacatttaccactacgaatttctcacttcaagcgatctcctgcccaggtgtgtgctctcagaaaattacatctctttctgaattacgctggcaaaggtggacctgttttcccaaaaggaccgtcagcacacccagcacagaccacctggggagctgaagaaaacgacctccctccctcctccccgctgggattccccgggctgagagcgtgagtgagaagcgcaaggcagtttctatcatgggatgactctccgctgggaacttcagggaaaccacaaccatcattactcaggccagacagctgccagaaaagcagcctagcctaagaactgaagctgaaatagaggtgggaggctgtattccattactaagcgcgggagcactcactcccaagtttgtccacatttcaagaatgttaaaaccctgtggtagaaatccctgattatttataacttaaactaccgtgtaaaagcagaaacttgacaaatgaagacataaaaagaactggtgacaggtaggctagtactagaatacaaagcattcatcacactcctcttttgtgggtccttccaaacctccatccccattccctactggaaaaaaaaaaaaaaaaacaacttttacttctattacagacgcagctgattgaaagggaaaagggattctgctctgtgatgagttttcagtttctctcacg

SEQ ID NO: 481882 - DNA, 1000 bp, Homo Sapiens
tgggaaaacattccatgctaagggatgggaagaatcaatattattaaaatggcaatactatccaaagcaatttacagattcaatgctattcctatcaaactaacaatgatgtttttcacagaagtacaaaaaataattttaaaattcatatggaaccaaaaaagagtccaaatagccaagacaatcctaagcaaaagtacaaagctggaggcatcatgttaactgacttcaagctatacaacagagctacagtaatcaaaacagcatggtactggtacaaaaacaggcacataaaccaatgaaacagaatagagagctcagaaataaggctatatacctaaaaccatctgatcttcaaacaaagctgacaaaaacaagcaatggtgaaaagactccccagttattcaataaacggtgctgagataactggctagccacatccagattgaaactggaccccctccttataccatatacaaaaatcagctcaagatgcattaatgacttaaatgtaaaacttgaagctataaaaaccttggaaaataacccaggcaataccattctggacgtaggaataggcaaatatatatttcatgacaaagatgccaaaagcaattgcgacaaaagcaaaaaattgaaaaacggtatctaattaaacttaagagcttctgcacagcaaaagaaactatcaacagagtaaacagacagcctacagaatgggagaaaacatttgcaaactatatatctgacaaagatataatatccagcatctatgaggaacttaaaaaaatttgaagcaaaaaacagtcccattaaaaagtgggcaagggcatgaacagatacttttcaaaagaagacatacatgtggccaacaagtatatgaaaaaaaggtcactatcattgatcattagagaaatgcaaatcaaaaccacaatgagataccatctcgtaccagtcagaatggctattattattaataaacagtaaaaaaaaaaaaata

SEQ ID NO: 481883 - DNA, 1000 bp, Homo Sapiens; identical to SEQ ID NO: 119972

SEQ ID NO: 481884 - DNA, 1000 bp, Homo Sapiens; identical to SEQ ID NO: 308617

SEQ ID NO: 481885 - DNA, 1000 bp, Homo Sapiens
gaattcagagctgtgaaaaaatacctcggccaggcgtggtggctcatgtctgtaatcccaagactttgtgaagccaagatgggaggatcgcttaagctcaggagttcaagaccagcccaggcaacatggtgaaaccccgtctcaacaacaaaaatacaaaaattagccaggcatggtggcacgcgcctgtagtcccagctactcaggaggccgaggtgggaggatcgcttgagcccaggaagtcaaggattcagggagccaagatcatggcactgcactgcagcctgggtgacagagcgagaccttgtctcaaaaaaataaaatttaaaaaaatacctcgtgagcaacgtttccttccaccagctgaagctggcctgtacacctgcagctcacaccctccaatttaaacattttctctttcagttcaagtcacttcaaaatatcactcttcaacatggccccttcaaactgccgtggctggctggccctggtatgggaggcacgtgtggaaggaacaggatgtggacacaggatgggaggacctttgttagtcccaggccggagggcctctcacttctcctggacaattgcctgtctccctgcacctgaccccacctgcttctgcccagaaagtccaggccgtgaccacagatgctgtccctcagggcagtcttctctgttggaacctgtaagccccacactttggatgttgggggagacaaagggagggtcttgatgtgtctgacccaggggactgcaaagctttcaatcctcaaatccttgtctccaggttcatcccctcaaccagaagtatggaatccctccttcctgcctgcctggtccctcaagccaatgagctaagggcacaaggggcgaacccaggactgaactagccaccggcccttaggacgctggtcacccacagagaagaggaggtagggccccgcctgggtttcttctgccagcgtcasstctccacttcagaacacacaaagctggg

SEQ ID NO: 481886 - DNA, 1000 bp, Homo Sapiens
gcatgcggatcacctgaagtcaggagttcgagagcagcatggccaacatggcataaccccgtctctactaaaaatacaaaaattagctgggcgtagtgtcgcgcgcctgtaatcccagctactcgggtggctggtgcagaagaatcgcttgaacccaggaggcagaggttgcagtgagccaagatggcgccactgcactccagcctgggcgacagagcgaagtcgtctcaaaatataataaataaataaacaaacaaactaaatagggcctatatgcaaatccaatttaatttcaaactctgtgttctttccactatatcccacctcttcccctataccctgatgggcatcaactgcttccgattaggtagcctgtcttacgagtaaaattgctatttagtgactgtgaattgaaagtagttttttttctgaccaaacacactgttcattcagaggtctttcaacagtaagtttttaactgcgtttatggtacacccccgctcctcccacccaactcagctctgaactgagctcagaggcgaaaagcagccctgatccccagtaactcacatttcagaggaatctctctttcatgcacaacggtaagggcagcttctcctggtcgtccaggggcactgactcccgcgtaaacacgacagtgacaggcaccatgaggcggagctacaggaaggagcatcagggccgtcactgagtctccaccttgccgggggggctgtcccccgaccctcccgcacagcagtctcacctgaagggcattcaggccactgatctgggagtaaggcaacgaggcccggtaggtctccgtggtcttccaccagagcggtagccccagcacgatggccaccgcagcgaagaagagggcggcgcgcttgccccgggccacctctgagggcatggggaaccgactgaggcgctggaaacgggctagggtaccggccccatccccgacgcggagaagccccaaccaccggcctccagg

SEQ ID NO: 481887 - DNA, 1000 bp, Homo Sapiens
ggaatagacaacgtaggggtgaccttgggtaagtcaaatgtcatctctgagccttaactttaccatctgcaaaatgggaacaataaatactccaggatgtatttgcatagggtgtttggaaggtggcccaaaatacagacaaaagttgctgtgtagggcaggcgacctagatgaagtgctgtcatagaaagttgaggtctaatcctctaacctacccacctttaggctaagtctgaaatgtagtttcttactaaaaagctacactttgagtctctggtttggttaatttttactaagttaattctttttaaagagtatctatcaaatcatgtactcaaaaaccttcaggaaaaggtgtaaatagcatttattgacaacgcttagaaataaaccatatctggcaataaataagcaggacgttttctggccagagttctcccaacaacacagagttcaggaaaatcataggctattgcatattttcagaaaatcaggataagttatataaattatatatttaaaaagaaatcatctatttcatcaactcaacaggataataaatagataaataataaacagttgattgccattcgaaaaatttgattcttaaattacatttacattatagatatttacatgtacaatatgcacagagacataatcagatcttcagccgagtctgggacttctcaggacacaaactcaaatggtggttcgttttctatgttgttgaaggaagatttgctgttgagttttctggggtcctctggggtccagactttggctgttcggataatattttgttccttgagttgtttttcatcagtccatgagagagagtgtcctgctaggggagggaggccataatcagggtcgctgggggagggggaccctggacaggtgagaagagaaaacagactgtgaatatccaaccacattcccattggtcccatcaggtcctttaggaccctttcctgggtgctctccggttatactagaa

SEQ ID NO: 481888 - DNA, 1000 bp, Homo Sapiens
ctaaacctcatgtggtatcctggggggcgagctggaacagaaaagggacattagaggaaaactggcaaagccaaaggaacagtggcgtttagctaatagtgatgtacccgtgctggttccttagctacaaccaatgtacacagcagcgtaagatgtgaaccttcggtgaagctgggtaccatgtgtaaaggaacactactatctttgcaactttcctgtaagtctaaacattttttttttttttgagacagagtctcactctgtcaccaaggctggaatacagtggtgcaatcttagttcactgtaactttccctcccaggttcaagtgattctcctgactcagcctcccaagtagccgggattacaggcgtgcgccactgtgctcagctaattttttatatttttagtagagacagggtttcactatgttggccagactggtcttgaacccctggcctcaaatgatctgcccaccttggcctcccaaagtgctggggttacaggcgtgacccactgcacctggcctgtaaatctaaaattctaaaataaaaagttcttttttattgtatttatttagagacagggtcttactccgtcacccaggcctggagtgtgttggcatgatcacggctcactgtagcctccacctcctgggctcaagtcatcctcccttctcagtctcccgaacagctgggaccacaggcacgtaccaccacacctggctaattttttatagagatagggtctcgctaagttgcccaagctggtctcgaagtcctgggctcaagcgatcctcctgcctcggcctcccaaagtgctgggattacaggcataagccattgcactcggcctaaaagttcttttttaagagggcctagttccctctggacactctgtggccaccagctggaaagccatcacacctccccagcccgcgctctccccagggtgaaggcgaagggcgcagtgcagtgcgcaaccccgcgggcagggcttact

SEQ ID NO: 481889 - DNA, 1000 bp, Homo Sapiens; identical to SEQ ID NO: 308618

SEQ ID NO: 481890 - DNA, 1000 bp, Homo Sapiens
tttttttttttttttcgtgggggcagctgagcagcgaggtttatagaggaacccagggcggcagcaggaaggatgaaggatgagtgtctgaaactgggttggcaggctcagggcatagccagcctaagctgggggtcaaaggcccctggccccttcactcccccaggggcacacagtgtcggcggcacgatgtgggatgccccaggaagggcaaggccatggggctgggctttcctccatcgacccaggacagagctggtgctgaaggccccatcagcatgactggggtggagatcttggggacctccttggggggccacagttggggggaagggcacagcccatccaacatgtccatctggtgtggctgtgccagcagggagtgtcccacatgcagagctccctctgggctgcaggaggtggggacctgggtgggcaggtgggcacagcagcagggggccccagggagcctaatccagcgggccctggaaaatgaggcggacgcagccatgctcgccggtaagccaggccccgcaaaaggggcaggcggcatggaaagcatgggtgccgtggggcagtggtgtctgggcccagtagcgggcagtcttctcagagcagacgtggccgcaaggtgcaaaggcatggctaggcggcccagggtccaggcagaggccggcctcctggccaagccatagaggcacataaggccccacaaggcggcagagaggacattcgcgctcctgggggccccgctcccgccggcagccccagccgtggtagccatggacgtgcccgcagcggacgtagacccagggctgctgtttgtcgggcgctgtgcggccacgggctgggctggggaaggccagagtgctgaggcccacggggcactggggccgcgctgcatttgcctcctgccgctgggcctccagttgcttcagtgtgggagcccgcagcagccccgccggtgtgcgccacagcagtgtggccccacacaggtcga

SEQ ID NO: 481891 - DNA, 1000 bp, Homo Sapiens
gatcaaataggggagctaaggaatgggcttactgaaaactgataactttgcccaccataaaaatttagagaatgactttttttttttttttttttttttttttttttggaagcagggaggaaagcagcagatggtctgggacagttagagaaaaaagagttcccagccatgcaagcaccctggtggcttcctgcaggaggtgacccattttctacggctctatgggatcatggctcaattggagggggcatcatctgtccggggtaggcagccttgcaggctgagcttgcttttaggattgctgacaattcccccaggtactgctgggagtcagcagagtcccttgaagctggtgccctgcacaagtccaggaggcaccattcacataggtcatgagttgtgcccatagcactccgggctcaggacctctataccaaactcttaaatatcatcacaaatcaatggccatgtgtttccataatatacttttggggagcatactgtgtaccctgggtaagtgacagaataaacgtttctgaatgtgagcttcctaaaatggacagcgttgtgaagatcaggtaaggctatatgtgccaaatgttgggcacagagcctggcatgttacactctcaaaagttgtacttatgtctgagaaaatgctacagagaggcccccctgaaggcagaccggccaggtttggtgcataccatttactgattaaaaataatagttaccaatctttttctcattgtaaaagcaatatttggtcaggtatgtatcagccagacctctcggagaaacagaaccagaaggacatgtatacaggaagaactcactcatgcaattatggaggctctgaagtaccatgacctgctgctgtcttcaagctggagactcaggaaagctggggttgtgtttccatcctaagtccaaaggcctgagaaccagggtagtggcagtgtaaatcccagtccaagggcatgaggagacggatgcatca

SEQ ID NO: 481892 - DNA, 1000 bp, Homo Sapiens
aatgtgcatagagtttatttggtacatctatcaatttctacaataactgaccaaaaacagttcacacagtgtccacctgcactccatgtctaaaatgatttatttagtagggtattttgcaaggctcttttaggtacacacgtattattcaacaaagcaaaactattttacagtgtctctatcatctgggtctgcaatggtgaaaccatttgatgtcattccacaaacaatcaatttagctggaatatccattttctttcgatactccctcagagcaatagcaggatggacacctccagcaaaggtctcattatcagtgaatacaatgaagacatcagcaggtgtgtttgtcttctgagcccagatcattggaagagagcaatcagttccacctgctgggatctgactcatagccattaaaacctgttgtaaggtcatatctgtagtcactggacatggtaccatttcatcggaaaaagcaactacataagaatctttttctgttcgtgtgacaaccatgcacattgctgcagcaactgtactagcgttgagtatactacccaaaactctttggttcatagaagcactgacatcaacagctagtaagaaacgttttccagttggttcaactgtcttaaatgttttataaaaagcagcatccaatgctttcaaaatttcttcatcagggcgccacttcagtttccctctgagaccatgacctgtcttgtaagtttctaatgcgatcaaaatatgaaatggatgtatacgagccttttttaatagtttttcattacacagtttttcacatactaaagatacttctgaatttcctggttcaagtactgaattagcagtcatctttcctagattccttagtaatgcagtaagcggcatttcttgtaacaaagccttccatacctctttagactttaagtgatttgttaaaagatgttctctaactaatctatgttcttctattagatgaatgacttctagctca

SEQ ID NO: 481893 - DNA, 1000 bp, Homo Sapiens
attgttgccaaagagatgtaaagtttattgttgcttcgcagggggatttgttttgtgttttgtttgaggcttagaacgctggtgcaatgttttcttgttccttgttttttaagagaaatgaagctaagacaaaagaaacctttgtgtgttgtcttctgaggtctgccgatgataaagtcctggacaggaggggctgtgccaggaacccgatgccagcccttcctggggccaggaggaagctgcccctctcctctcctccccactgtcctcggcacaccccggtggaggggatggtgttctggccctactgtgtgtgggggcgcaggggtagcgccctgcaggtctcccttcctgcaggccgagttggcctggtagggacgggtgaagaatggacctacaggcctctccaggacagcctcctccctgcccttctgagggcaatgtctgtctgtccctgggcccagggtggaaggcggaggcaggagagttgagcacagctgggcttccctgcaccctccgctggccagctctcaactgccctcctggcccgccaactctacagcttcctgtccccggggtgtgagtggctgtaggcgggagtgagctctgctggagacacctccccagccaggtaagggctgttgtcaccagtgcagctcaccacactgtatttcacctaacaaacaaacaaacagtatggaagagcacaaatctgctaatgaagttttaaaacccccaattccagcagagctccccagtgcctgcaggagtcagcggaggtgggggggggaggtccacccaggagtcctggggcagaccccggaagcggggaagcccccacctgccagcgggcactctgctggtgaccccgcatagcacctgacagctggcctttggccgcaggagcgagctgggaggccctggcagcaaggttctggatgggaggttgggtaaggaggagggctggggcctgcccgaggcaggaggggcctggggaggc

SEQ ID NO: 481894 - DNA, 655 bp, Homo Sapiens
ttttttttttttttggatttcacaagcatttattaagcatttttatgtgttctatatcaagtactagggatatagaattcagtaactgtaggtcaacaaatgtccctgccctcaggggctcacagccaggtctcctgagagcagattgaaaaggaagctcagtatttctctggcaggccagcaggtcggaagtgattggggtctttgccactctggccccatttgttggtagcctggccagccagcgaatcctctgcatggtctcctgtgagtctctggacgttctctctggcatcgctctctcctgactgtccaaggcagtcaagctctgctcactcattcctggcaacatcaggaatgtgcattacctgatcacttctgtagcccagacagccccaagccccctttgtacagcatcatagttcccccaagcatggaagtatttgtctgaattttttgtaattggcttctttcatgtcagagtaggctttccacatgtctttagtcccttggccagctgccttgaggaatgttaaccatccttggctgctgacacccaggaccagggagcagaaaatgatgccagaggagagcttcatcctgctgcagggccaaggaaacacaaccaaggataatacacattctgtttcaagtt

SEQ ID NO: 481895 - DNA, 1000 bp, Homo Sapiens; identical to SEQ ID NO: 308621

SEQ ID NO: 481896 - DNA, 1000 bp, Homo Sapiens; identical to SEQ ID NO: 308622

SEQ ID NO: 481897 - DNA, 1000 bp, Homo Sapiens; identical to SEQ ID NO: 308623

SEQ ID NO: 481898 - DNA, 1000 bp, Homo Sapiens
cagctccacagaaacacggaggggcagctccacagaaacagctggatcacctgcatcgcctcagtgacccgccatgcctcctgcccatcagagctgtattcctttttttttttttttttttttttttttttcagacagggtctcattctgtcacctaggctggagtgcagtgatgcaatctcagctcaccacagcctccacctcttgggctcaagggatcctcccatcccagctcagtgccaccacccccaagtagctgggactacaggcacatgccaccacacctgcctaatttttgtattttttgtagagatggggtttcactacattgcccaggctggactcgaactcctggactcaagcgatctgcctgcctcagcctctcaaagtgctgggattccaggcatgggccactacatccggccatcatgctgtattctaactgccctctcccccactatgagctccatggaaacagggaccatctcccagatgcctgtggcaggcacttagaacaatgctactagttccactctctggaggtcagctcctcaccgcaaaaagagggctggggtgccctgaagctgtggagtcctacacatgctctcatggccgagcacagtggttcatgcctgtaatcccagcactttggacggccgaggtgggtggatcacttgaggtcaggagttccagaccagcctggccaacgtggcaaaaccccgtctctactaaaaatacaaaaattagctgagtgtggcggcacacacctgtagtcccagctacttgggaggctgaggcacgagaatcgcttgaacctgggaggtaaaggttgcagtgagccaagatcgtgccaccacactccagcctgggtgacagagtgaaactctgtcttaaataaaccaaaagaaaccagtgagcccctcctgcctgccagttgtagctgggcaggtgtgggctctgaggccttcagcctctggggctgggcagtgtgaagcaatgc

SEQ ID NO: 481899 - DNA, 1000 bp, Homo Sapiens
ctgcagatcctacaaaaggagtgtttccaaaatgctgtatcaaaacaaaggttcaactgtgttcgtttaggacacacatcacaaataagtttctgagaatccttctgtctagtttttatttgaagatatttcctttctccccgtaggcctgaaagcgcttgaaatgtccacttccagatactacagaaagagtgtttcaaacctgcactctgaaaaggaatgttcaattctgtgacttgaatgcaaacatcagaaagaagttcctgagaatgcttctctctagattttatacgtcatcccgtttccaacgaaatccacaaagctatccaattatccactttcagattccacaaaaagagtgttttaaaattgctctgtaacagaaatgttcaactctggtagttgaatacacacatcacaaacaagtttctgagacggcttctgtctagtttttatgggaagatatttccttttaaccataggcctcaaagagctcgaaatatccacttccaggtagtgccgaaagagtgtttcaaacctactctataaaagggaatattcaactctgtgacttgaatgcaaacatcacaaagcagtttctgagaatgcttccgtctagattttctatgaagatattcccgtttccaacgaaatcttcaaagctatctaaatatcaacttgcagattctactaaaggaatgtctccaaaatgctgtatccaaacaaaggttcagctctgtgaattgaggacatacagcacaaagaagtttctgagaatgctcctgtctggattttatatgaagataacccgtttccaacgaaatcctcaaagctatccaaatatccacttgcagattctaccaaaagagtgtttcaaaactgctctgtcaaaaggaaggttcaacactgttacttgagtacacacaacacaaagaagtttctgagaatgcttctttctggtttttatgagaagatatttcctttttcaccataggcctca

SEQ ID NO: 481900 - DNA, 1000 bp, Homo Sapiens
taagagtctggccagacccagacttctctgacagacaagacctcactacaacaggaactcaaggaatgctccacactttgtttctggcctttggctactgttctttactggggtaccacttccctagagtaccaccttggctaactcctcctcatccttcaggccatttcccccatttccttatccaaggctgagtcaggtgctccttaaggtcacataggagcattccactttcactgcctgtctggctgccttgcccattagactgtagagactacagtcttgttttccactgtattcctagttcctgggacaaagtaggtactcaaaaaataacctttgggtaaattatattctttcttctcatgcctatctaattcctggcctgccctgggctcaacaaatcattgatgaagccatttccccacctttcctgctgctctgtcactgttctttattgggtcagttttttttttttttttagttcctgagtcgaagtgcctcacacagtccacacaagccccataacctggcacactaacaatcagatgcagtgacagagcctgggttgctatattcatgacactttcatacaaaatgaggtttcaatgttacattcccacttttcgtatttcctgagtattcctaataagagaagagctggaagtaatgattcttctgtattctgttctgattagtcacaggaaaagctttcaagggacactttacattagcactgggaaatgctgcacaaagcaagctagactcaagacctagtattttataacctttatggagttttgctccaaagtaaactcttttgactaacaaacttaaaaatctgactgaagtatttacactattcacagtattcacaaattactttatagtgtggactctttgatggcgcataaggaccgatctgtgcctgaaagccttcccacattcattacatatataagcttcatccccagaatgaattctctgatgctgaacaagg

SEQ ID NO: 481901 - DNA, 1000 bp, Homo Sapiens; identical to SEQ ID NO: 308625

SEQ ID NO: 481902 - DNA, 1000 bp, Homo Sapiens; identical to SEQ ID NO: 119973

SEQ ID NO: 481903 - DNA, 1000 bp, Homo Sapiens; identical to SEQ ID NO: 308627

SEQ ID NO: 481904 - DNA, 1000 bp, Homo Sapiens; identical to SEQ ID NO: 308628

SEQ ID NO: 481905 - DNA, 1000 bp, Homo Sapiens; identical to SEQ ID NO: 308629

SEQ ID NO: 481906 - DNA, 1000 bp, Homo Sapiens
tttttttttttttttttttttttttttttttttttattttcaaaaacaactttattcatgacacatattaaaaaaaaattcccacccctggaaatgagctaaaaaaataaacaaaatccacctcccacctccctgttcccacttcctcccattccctccaaataaaagggaaaaaaggcaaaggaaaaaaaaaaaacaaaaaaacaaaacaactgaaaaacaaaaacacccctaaaccccccaaaacaaggtagtgcatttccccagggggaaggggaatttacactggagccgctgggagcggaacggagatcttccggctacagaaacctgcaaagaaagacactcaaaacagaaaaagaaacacaaaaggaaacaaaatagatcaccaggcaatctggaggggcagggagccggagaaagaggggtggggtgggtggtagacctggctggacaggagcaggcaggaggggactgtgaaaggcgaggagaagacgggagggaaggtaacaagcagaacagtttggtgtccttccagagccctgggtaaaaaaaaccctcctaccacccacgcccacctacccttgagcaggcccaagggggtgaagggggcagggaaacatgggcaagcagcttgcgcagttgagacgtgtccatggcgaatccccagagtgaataagcagccccctgccccactccctgggccttcccctactccccaaagcaggtccctcctcagcagttagttatgggattctccccccttccacagtatatcttttttttaaaaaatattttttttccatcaaggtcatcttctgtttttcttttttttttttttaattcttttttttttccttctttcctctttttttcctctctctcctcctaatacacactttttttagtaaggggaataccatgatgtcgctctagcccggcccctggaagaaagaaggagagttaggtgttaacgtgatcactagatagttcagtacaa

SEQ ID NO: 481907 - DNA, 1000 bp, Homo Sapiens
aacttaagacaccagccacagcccctcctccctcaacccaggtcctagcccccagctcctcctccctagttcccaggtcccagcccacagcctggccacacctgcacacagtctgtgttgtatttccggcagacctcttccactgacatcttgtgctctgtctgaggaacaggagtttgggggagacggtgagtgcctaggccagccaagaactggggaaggttctctgggagggtgtgcgggcagagggcgaggcttaccatagccacctccttcttgaggtcatccaggtcccggcgctccttgcccttgttcttcttgggtgagtccttgtcatctttcttgtcctgcgaggtggcgatacgatagctgtcagagccaccagactgcgggcgagaaggggttccaggaggacaccggccctccatgccccagctatcctcctggccggtgcccctgcatctctgggtggggggtctctgtctgcctctcggggtctccctgtgtctcccggagcctctgggtgacttcacctcccttctgcctctggtgactctcaggcctggtgagtctcatctgctgcaatcagcttccctgtctctggttctgtgtgtctctgagtctctgtccccgaaggtccctgtctggcttctgcctgtgtttcagtctctctctgtttctgtgcccatctttgcggggctctccccttttgtgttctgtgtctatgtgactttgttttcgttttttgaaacaatgtctcactctgatgcccaggctggatgcagcaatcacagctcactgcagcctcgacttctgagctcagtgatcctcccgcctcgcctcctgtgtactgggactacaggtgtgtgccaccacgcccggctaatttttaatttttttctagaaatggcggtctcactacactgcccaggctggtctctaactcctggactcaagcgatcctcctgctttagcctcccaaactgttgggattatagga

SEQ ID NO: 481908 - DNA, 1000 bp, Homo Sapiens; identical to SEQ ID NO: 308631

SEQ ID NO: 481909 - DNA, 1000 bp, Homo Sapiens
gatcagccaccctggcaggctgcagtccctctagctgtgcaggtgggcagccaggccgtgtccagacagcccccgggtcccatgaacggtggctggtactgctctaccagcccctcctggcctgtccatccccagccctcacggagggactctgtgcaaacagtaaccacccagccacccccacaccccccagccaggtgaggccccaagggccggtgtgggtgcccaacccatccccagcaccagggccacgctgttcctcgggcctctgcacttctgcttcctggccaggggaggccccagtagccacctcctaacagttaaggcccggggccaggaagcacagccacttagaattatctcctccaagactcggcactacaccaggccctgcctgtgcacagcaggtggggctgcacggattaagagccagggctgggtgtccaacgggcccagatctcactgcaccccagcactgcagccagcacagccccccgagcctggaggaagagggggcaacaacacgccacctccatggcacccccagcctggcagctgacggcaactggccctgacatggaggggcccctggcaaaagggccccccaagcccctacgcagaaagatccagcaggctaatttgtctgtttattcccacaaggtagccaggggtgggggcgccgagccaagcccagcaggccatgggaccttcctccggcggggtgcacgctggattttcgggtctgccccaccagcaggtttgcaggcaggccgtcatgagtgccggtggaaggctccaagggcgtgggcaggggctcgggcggggccacacacttgtggagctagaaatagtggggcaggtccttctctatcacctgtcggggaggaaagctgggttagggcagctacctcccaagcccccgagcctcaagcgggctccctagagaggacctaccaggggctcctccatgggtccgtagcgcttcaccacgcagccgttc

SEQ ID NO: 481910 - DNA, 1000 bp, Homo Sapiens
gatctgaggaaacacacgcaaggcagagagacctgttagtagagggctgccgcgtacagctgtgtaggttgtgcactgcccaaaacactgcagactcgaatgttcacacaggcagcatccagcgcagggcaggaacaggtctccaggctatacaaaggccgtggagcactgaggaggctcagcggggagggcagagaagtgggtgggggctgggtcctcagggcctggaggggagaaatgaatttactttttccttggagagcagtagggagccacagagggttctgaggcagggagggccgtggtgagatgtgcctgcagcagctcccagaggccctgacctcacctctcctttcactccaggccgactccggagggcccctggtgtgcaggaaccgggctcacggcctcgtttccttctcgggcctctggtgcggcgaccccaagacccccgacgtgtacacgcaggtgtccgcctttgtggcctggatctgggacgtggttcggcggagcagtccccagcccggccccctgcctgggaccaccaggcccccaggagaagccgcctgagccacaaccttgcggcatgcaaatgagatggccgctccaggcctggaatgttccgtggctgggccccacgggaagcctgatgttcagggttggggtgggacgggcagcggtggggcacacccattccacatgcaaagggcagaagcaaacccagtaaaatgttaactgacttccagcctcacccgtgggcggtcagctgcagggtccaccggcattcgtgtcgcggctcggtccgcagcccctttccaccttcccatgccccccaccgtgaacccctctgggtctacccctgcgcccctgcaacccacactcctgcagcctcccacctggaatgccgttcctccacctccctccagccgcctaaccacaccgcaggcgagtccgctgggaaacggaggccaggaagccctgagctccctgtgcagggcgt

SEQ ID NO: 481911 - DNA, 298 bp, Homo Sapiens
tagtacggtcagcctagagccttctccaaaaaacagctccccggtgtccgtcactgtcctcgggctgctggcacagaaatacaaagctgagtcccccagctccagagagctcaggtttagttcagagtgcaagtcagggaactgttgtgcggagaatcgttcaagaatgtttccttttgctctctcttctccattataatactgaatgaggaactggaggccctggtccaggctctgttggtaccagtacacagagaggtctccagacctaggggagcatctcagcgtcacttgctgt

SEQ ID NO: 481912 - DNA, 1000 bp, Homo Sapiens
tagattttgcactaatctgtatgacccatctggtttctttactgggagaactggagtattgtatggtgacatacagggtttcaataacccatcttttttttagtatgaaatcaatttttatttttaactaaaaataaatgcttaacatctttccaaaatcaaaactaaagacaaacaaacaaaaaaaaagggtggaaacatattttttcttccctggggaaaccactaaggcagatattgtagcacagcttggttttttccagaggactaatccatgcaaacagaatctctctccagcttgtcagttttatctacctggcaagaaaaaacaaaaacaacccctccccacaaacacaacacaaaacaagagactaaaaaatttgggaaaaagcttttaatgcatttctgcaaaatcctttctgaggaggtttagtacaggtactacccaccagcaacttagccagccaggtgagttggtgcagaagcgcttagggtgaattaataccagagtcaccgtgtgtgactcagccacctctcccaattaccacaaggaggtcttaaaattgaatttcagtttcagcagatatttcagatttacctgagcaatatcatagacaatgtactcattatacagtagacaggtgtcattcacaccagatgaaaccctggtcccaagaggaacctctacaccatccagtgggatactagctgaaaggtcaggagtagttttgcccaaacctttgacactgtgcttgcccttgggtaacttgctgatatgtgaagcatgcttcagttcacacacgtttccaagggcaacttcttccgacaggattaaccctattgggtcttcctaagatgtatggcagtcgttggcactcttggagacaagatcagcgaaatagatcactttaccaaacatgtagcccatcacaggtgcttcaggcagggctatccaaagacccagggacaggatcccagcaaagttggtggtcctggaccc

SEQ ID NO: 481913 - DNA, 1000 bp, Homo Sapiens; identical to SEQ ID NO: 119974

SEQ ID NO: 481914 - DNA, 1000 bp, Homo Sapiens
gatcctgtggtaaaaactagaaacaacctaaatatggaaatgctttgagaaatgtgattcatctcacagagatgaatctttgtattgattcatcaggttggaaactctctttttgtggaaaataaaaggtctaaaaagagacatatctgagcccattgtggcctacagtgaaaaactgaatttcttgaacaaacgctggaaaccagctatgtgtgaaaatgctttgtgatgtgtgggtttatctcacaaagttaaaccattgttttgattcaacatgttggaaacactctctctgtagaatctatgaaaaaacatttctgagctcattgagaagtatagtgaaaaaccacatatcctgaaatagaaactagaaacaagatacgtgtggaatgtttgtgatgtgtggattcatctcaccaaatggaacctgtattttgattcacccagttggaaacacactttttgtagaatctacgaagggacatttcagagcccattgaggcctattgtgaaaaatcaattatcccatggtaaaaacttgaaacaacctatctgtgaaaatactttgtgatgtatagattcatctcacaaagttaaaccattgtttttattcaacacattggaaacactattttttagaatctacaaatagaaatttcttagctttttgagacctatagtaagaaactaatatcccacaataaaaactagagacaagctgtatgtgaaaatgttttgtgatgtgtgcattcatctaactgaatggcacctgtgttttgattcacaaggttggaaacactttttgtagaatctacagaggtacatttctgagcccattgaggcctactgtgaaaaaccaaatattctgtgataaaaattagaaacaagctatctttgaaaatgctttggtatatgtggatttatctcacagcatttaacctatgttttgattcaacaggttggaacgacttttttagcagaatctatgacagtacgtttc

SEQ ID NO: 481915 - DNA, 1000 bp, Homo Sapiens; identical to SEQ ID NO: 308633

SEQ ID NO: 481916 - DNA, 22 bp, Homo Sapiens
gaaagagaccggttcactgtga

SEQ ID NO: 481917 - DNA, 21 bp, Homo Sapiens
ggggtatttgacaaactgaca

SEQ ID NO: 481918 - DNA, 1000 bp, Homo Sapiens; identical to SEQ ID NO: 119976

SEQ ID NO: 481919 - DNA, 1000 bp, Homo Sapiens; identical to SEQ ID NO: 308636

SEQ ID NO: 481920 - DNA, 1000 bp, Homo Sapiens
tcccacaatcccctttcctcccttccccccagcccagtgcagggttccgggaacgcagctccctccgagcacagagtcctcagacgcatgagagcaggtgggcactggctttatttgggacctgcttctggaaggcgcagggctgcaggtctcctggctgggtgctcagctggtcacaccagcagctttccccacaaatcccaggtctaggccaaccctggcctgcggccgctgttaccacctcagacactggtctaagtccagggcagcctgggatccctactcctcttgaccccaaaggccagcaacgtgggctgacacccctccccggggcatctttggacgggtcctgcatccagcagggatgtggtcatctctgtcctctcagggcctgggagccagcgggtctggccgagtgttagggtggcttcctggtctccttccttagcagggagctggccacagccaaggcgcccccctgcacaaacctcacgaagttgtccccggccagcggccccatggcgtacaggccctcctggcgggtgctctggtaggtgaaggggtccacgtcaatggggttcctcttggcgctcagcggctggtcgggatccactgcaaagtcagcccctgccccaggcaggaaggagaggtcggggtgggagccgatgaggaccagcaccagggagaccccaaacaccttctcgacaccctcgaggtcctggaacacggcctggcagtcttccttgaagcacagcagctggtgcctggggaggctgcggtaaccctcataggggctgggcgacaggatggactgctcccgcatcatctggtgcaccttgtggtactcggggtacagcatcttgggcagctggttgaacaccaggccagggtcgtccacggcccggcggaaggcatggatcaccgggatgttgtagtggcgggcgtagaggaccgcgtcggccgctgacagccccgcgccaatgatgaggacagggtctga

SEQ ID NO: 481921 - DNA, 1000 bp, Homo Sapiens
gagctcagtagtctgagttactgactcaaagagtgtcttaggtgattctaaggcacactcaagtatatagtccctactagtcaaaagccactgtcttgtcaggcatggtggcttgtttctgttatctcagctactctggagactgaggaaggatcacttgaggccaggagctggagatcagccggggcaacatagcaagaccccatttctaaaaaaaatttaaaaagctaaccaggcatggtggcatttgctactcataaggtcccagctactcataaggctaaggcaggaaaattgtttgggaccatgagttcaaggctgcagggagctatgatcatgtcactgtgccactgcactccagcctgggcaacagaggagaccccatctcttaaaaaaaaaaaaaaaatctaccatgaatcacacagcaagagagagatcttcctgaggtccccaggggtcagaggctttttccggctgctcagacacacaaaaagatggaacagatcaacaaatctttattaatagaaacagacagatggacagagaatgcagcaggggctgtgtgaaaactgtgatatgtgtgtgtgtgtgtgtgtgtatgtgttgtgtgtgtgtaaaaggccttctccaggccaggaagggccccttggaattaggcccacctgtctagatcctctcctcagtggtgggtcctgggctgaaaccagcttccacatcatacccccaaaggaagaatgggggtctttctggaatggaagacgctgacttcaagcattcttcaaattactctcgttccccagctgagctttgttgctgagggggttggggacaagccacaggggcacttgcatagcaggggagtagaatggggataaggcatatggtgaggacaggggagaaggggaagggcatcatagctgcaggtgaagggggcctccaaaaggcagctcctcttccccctcatcccctcaaattgctgctgggttgaggagtcagactg

SEQ ID NO: 481922 - DNA, 1000 bp, Homo Sapiens; identical to SEQ ID NO: 119977

SEQ ID NO: 481923 - DNA, 1000 bp, Homo Sapiens; identical to SEQ ID NO: 119978

SEQ ID NO: 481924 - DNA, 1000 bp, Homo Sapiens; identical to SEQ ID NO: 308640

SEQ ID NO: 481925 - DNA, 1000 bp, Homo Sapiens
cccctgtgaccacttcatgaaagccgctgcagctcaagaaggctcagtggggagtggagctctttagggggccttggaagggcccaaaccagctgtgtgaccccaacgatgacgtgggtgtttgtggatgccctgcaggacaggcatacagcaggtgccaaatcaatgcacacctgttgttctgtcgttctcctgcctgcatggaaggcagtggtccttgggcatgagaaggccagagacccacaggcagcccccgccccagccctcagccccagagtatcctcctcccctaccagggctggccaggaggctgggcttctccagaaggaatttctgcgtggggaagaaggcctcctttgcaataagcagtgagtcttcaggcttggccatgccctaggagacaagaggcaggttgagagggcacctggtgggcggaaggctcactggggcagcctgccctgcagggatggtggcagggacacttacctgggggaggctgcaggtgctggaggccagcttcatggctttcaggatgctgccagagcaagtggagagggtctgaggtcagccagcccccgggctggaggagaggtctttcaagaggcactgacccggcttacctccctgacaatgactgctccattccccagaaccccattaattccagagtcattgcaaccccaggcctgaagtagcaggctcattaacaggtggcgatgttacctggaggggtgctgcctgaactgacccattctggccagcttgagtttagctggttaatgaatcaccttccagttaccatgcctataataagttcccttgtatggtctacaggcagcttctttttttctttgagatggagtctcactctgtcacccaggctggagtgcagtggcacgatctctgcctcccaggttcaagcgattctcctgcctcagcctcccaagtagctgggactacaggtgagcgccaccacacctggctaatttctgtattttta

SEQ ID NO: 481926 - DNA, 1000 bp, Homo Sapiens
  misc_feature (86)..(86): n is a, c, g, or t
  misc_feature (146)..(146): n is a, c, g, or t
tgagagtgagacctggctcacctctcagagaggcacagagaggaaggagattggggcagccgagtgagtgcacctcctgcttcttntgcattcccaagccgcagtactgcccaggcccgcagtgttggctgctgcctgccacagcntctgtgactgcagtggagcggcgaattccctgtggcctgccacgctttcggcatcagaggatggagtggtcgaggctagtggagtcccagggaccgctggctgctctgcctgagcatcagggagggggcaggaaagaccaagctgggtttgcacatctgtctgcaggctgtctctccaggcacggggtgtcaggagggagagacagcctgggtatgggcaagaaatgactgtaaatatttcagccccacattatttatagaaaatgtacagttgtgtgaatgtgaaataaatgtcctcaactcccttcaggctccctggctgccttgtgttaaatgacacctcctcttggctcaggcctgaggaaagctatccctggactctaaaaagtcacctcaggctggaaggaaggaaggagatgaggtcatccatgtccaagctttggcacacggaggccccagctcccctgttctgggctcctagagcaaggctgcgggaggagctttccttcctgggcacctgagggccctgcagagagctgggctgccatgaatgaacaggctgctagagggagcagccagactgggcgtcctcacctgaactgagattaagtgaaagaaagccaaggccctggccctctccgttcccttacaggtgggtatggtcgagagaggtgtggtgattcagccagggcctcccacagggccccggactcctggccaggagtgtcttccactgcatagaactcccagaagctcccctaggagctgccttcatggaattctgtcctggaaaaacctggctgcactctcagggaatttgagacctgctggcttcccgcgcccaaaaggaaaca

SEQ ID NO: 481927 - DNA, 1000 bp, Homo Sapiens
aaatacagcactatatcccctatgaatatataagcaaaaatctcagcaaaatactagcaatactagcaaaatactagcagcaatactgtataatcaaaggattgtaaactatcaccctttgagatttatccccaaaatgcatgggtggttcaacatataaaaaatcaatcagtgtaatatgctgtaacagtaaaatgaataagcacgtgattatttcaattgctgcagagaaaacattgatgaaatacaacacccttctataataaaaatactctataaactaggcatagaagggatcttctgcaacatgacaatgggatgtacaaaaacccaacagttaatatcatgatcaatgatgaaacactgaaagctgttttcctaacatctagaagaaaaggatggtgcatttgccacttgtattcaacgtagcactggcagttctagccagagcaattaggcaagacaaagaaataaaaggcatctaaattagaaataaaaaataggtgtaaaattatatctacacatgatcttataggtataaagctccaaacaaaacacaaaaccgattataactaataaaggaggcaggatgcaaacaaacataggcaaatgagctatatttctatatagttgtaaagaactatgaaaacattttaaaaattccatttataatgacatcaaagaatacgttattcaggcataaatctaaccatggtggtatacacaaaacattgctgcaaaaaactaaagagagtggaaataagtggaaagacattctgtgttcacgggttgtaagacaatattgttaagatgacaataccatctaaagtaatctacagattcaatgcaataccatcaaaatcccaaaggcatttttgcagaaacaaagaaactcattctaaaatcatacaaaaattcaaaggatctgacagacaaaacagtcttgaaaaagaacattggaaaactcacatttttcagtttcacagactactacaaatct

SEQ ID NO: 481928 - DNA, 1000 bp, Homo Sapiens; identical to SEQ ID NO: 308645

SEQ ID NO: 481929 - DNA, 1000 bp, Homo Sapiens; identical to SEQ ID NO: 308647

SEQ ID NO: 481930 - DNA, 855 bp, Homo Sapiens
ctctacttcattcaactgaaaaccaagtttaagcatatctgatgggcatttataccacatcaatatttatttaatgaactttatgcaaaggcacattgatgagtttaaatcactatagtccttatagattgaaacagaacaccagtagtgaaatgacatttattaattccattaagacacaactacatattttattcttataatggccatgttaataagttcaaggatacttcaagttaggtcaaaatttggccagggcttggttaagatagacccttaaaacattgcacgttgatgttcttttgaacaagtttgtctccaggaccagtaaatatgacactttggattttaagctgattaaagagaacaggttttattaataaagactgatctcaaaatgctgggattgataaaagaattaaagtttcaacatatcaattttaagaagcaaagtgtttcaacaactgagaggtaagaaaatcttgttatttgcatgtatttttatataatcaatcaggttgcagattctaaaattgctcatatccagcatgatggtgcttgagaccaataaaataagccagcaacactagaataagtactcctgccaaggcagctcccaccgcaatgggcacaaggaagttgtcgtcatctgcactgcagtcttgagctagatgtggagaaaggacaattgagaacagaaacagtgacaaactttcaaatctgtgtattttgagtaaaatgacagcacttctaacacgcatatttggttttttatacaaggtaacagtcattggcatttcattatcagcaaatgagatgtcacaaagtgattttcaatcatatatctgcgtatgc

SEQ ID NO: 481931 - DNA, 1000 bp, Homo Sapiens; identical to SEQ ID NO: 308649

SEQ ID NO: 481932 - DNA, 1000 bp, Homo Sapiens; identical to SEQ ID NO: 308650

SEQ ID NO: 481933 - DNA, 1000 bp, Homo Sapiens; identical to SEQ ID NO: 119980

SEQ ID NO: 481934 - DNA, 1000 bp, Homo Sapiens; identical to SEQ ID NO: 308652

SEQ ID NO: 481935 - DNA, 1000 bp, Homo Sapiens
gatctatttaatttctccagccatttcccaacccttcccacagtactagaaatcttagtcctataccagagtaagaggtgtgtacaagcccccactgtactgtatgcacggatcgcttggccaataattatgtcagtgaatctgagacttgtattaaacactttagacatttgtagaagggaattcgtagacttttcacttacatacgaaaggtttttttttttttttgtgcagttctcattgcaaaaataaacatttgtactgagtataaagttactctcctgtgatggctgctttttgtttgagggtagacttgggagaagcggggagatgagggcggggggtcagtgatgtgtaggagaggaagaagggaggttccccagacacccaccacccatgcgtccagattagcggagtcggttgggagagatcctgggaacatcaaattgtgagataattgatttaatggaaggtgtaaaagaaaaagctgccaggcacggtggctcacatctgtaatcccagcacttttgggaggccggggtgggaggatcgcttgaggtcaggagttaagagactagcctggccaacatggtgaaactcccatctctactgaaaaatacaaaaaattagcggggcgcggtagcacacacctgtagtcccggctactccggaggctgaggcaggagaattgcttgaacactggaggcggaggttgcggtgagccgagatcacaccactgcattccagcttgggtgatatggtgagactcccatctcaaaaaaaacaaaaacaaaaaaacccccaaagctttgatgtaggctaatcacacaacaaaagaaaggtagtggttaagtagtccagggagaacaaaagtttgtacactatgggcaatgtaatcatagtggtctattcggctcttgagatgcattgttcactgaggcagaacataaaccactattcacctttaagtggcaacttcatggacttagttatggtccca

SEQ ID NO: 481936 - DNA, 437 bp, Homo Sapiens
  misc_feature (25)..(25): n is a, c, g, or t
  misc_feature (66)..(66): n is a, c, g, or t
  misc_feature (86)..(86): n is a, c, g, or t
  misc_feature (88)..(88): n is a, c, g, or t
  misc_feature (101)..(101): n is a, c, g, or t
  misc_feature (129)..(129): n is a, c, g, or t
  misc_feature (136)..(136): n is a, c, g, or t
  misc_feature (148)..(148): n is a, c, g, or t
  misc_feature (160)..(160): n is a, c, g, or t
  misc_feature (188)..(188): n is a, c, g, or t
  misc_feature (230)..(230): n is a, c, g, or t
tgggtgctcaccgccttttatcccnagcccttttgggaagcccaagccgggcggatcctttgaggntcaggccgatcgaggcctancnctggcttaaccanggtgaaaacccccgtctcctacttaaantttacangaaatttaaccnggccgtgggtgncacgtgcctgtagtcccagctactcggnagtcttgagccaggagaatcgcttgaacccaggaggtgtagnttgcagtgagccgagatggcgccactgcactccagcctgggagacagagcgagactccgtctcaaaaacaaaacaaaacaaaacaaagcaaagcaaaacaaaacaaagtaaaataaaagaaaacacaaaaaacaacctgaagctatataaatgctaggagaaaacctagtgaaaactctctttgacaccggtctaggcaaagaattc

SEQ ID NO: 481937 - DNA, 239 bp, Homo Sapiens
agtaaaagcacagtgtgagtagcatgctagcatttgtataaaaataggaatgtgtgtgtgtgtgtgtgtgtgtgtgtgtgtgcatgtacatgcatagaatgtcaatggataattgttgaagttgggtggtgggtacgtggaggttcattataccatgtgctatttattgcgtatgtctgaaattgcccattataaaaagttgaaaatatacttaaagtgatgacagtaaaaagaatatc

SEQ ID NO: 481938 - DNA, 1000 bp, Homo Sapiens; identical to SEQ ID NO: 308655

SEQ ID NO: 481939 - DNA, 1000 bp, Homo Sapiens; identical to SEQ ID NO: 308656

SEQ ID NO: 481940 - DNA, 1000 bp, Homo Sapiens
aatgtcacctcccgagagcccctccctgaccgctgggcacccccgcctcacctgcccccaccccacctacccctctgcccgtcataccctgagtccctgcgtgggtcccgttcactgctgcatccaacgcccaggccgtgccacgccgcgggggcctcagaagtgagtgttgagcagctgaaaagccacacgcaccacgtgtgtccccaggcgacactgtgccatggcctgggggtccctggaaaggagtgagaggtgcccagcgctggaggggcagggccaatctcagcggggatctggggagggaggtgcaggcaagcagggagcggctgtgctggggaccccagagaggttgctaccgtggccaggaaggcagggctgggggggccgaggtggctgcacctgggctccccagctggaaggcaagatgtgagccccaaacctccatctggcaccaccgacaatgctgcccctgcgtccgccgctggggaagccgctgtccttcccacaccccagggcaggaggatgccctgaggccaggagctatgggtggggacataagacccaggctccccagcttccttggcgtccacccgcccggccgtacccccaccctcggcgaagcctgaggggccccagggacaactgggggaggagggctcctgcctccctggaaagcactgtggtttattgactaaatgcagcccatcgatttgttaagagcttttgcacgtctcctcgatgggaaatattgttctctcacccggctggctggaacctgggtgagaagttcttccctgcacaccataaatttccatctgggcatcccggcactgtgtaaactggtgtccacccgtgcagggaggaggtgcttgatggtctaacagcccctctgggttcggcttcccagagctgccgccgccaggaaaattgctcccccagacaccccagtgcccggctctcaaccacaatggcccagcccaccaggcctcctgccccc

SEQ ID NO: 481941 - DNA, 1000 bp, Homo Sapiens; identical to SEQ ID NO: 308657

SEQ ID NO: 481942 - DNA, 1000 bp, Homo Sapiens; identical to SEQ ID NO: 308658

SEQ ID NO: 481943 - DNA, 1000 bp, Homo Sapiens
gtgtataagcattgccttctctccacagccttgttttgttgttgttgttgtggttgttgacttgttttggttttgttgatgatttttgacttttaatagagacctacaggattatgacataatgggaccatctttagacaagcaaagatggaagagcataatgcctgggggtggggtaattagttgcgatacgagctacgcagcatgcaaggttgacgtattgaaatggaggatgcacatacggctgtgattgctttgccaagtggacttgaaaggtggtcattctttgctgtgtataacgggcatcctggttctcaggttgccaaatactgctgtgagcatttgttagatcacatcgccgataaccaggatttacagggtctgcaggagcaccttctttggaaaatgtaaagaatggaatcagaacaggtttcctggagattgatgaacacgagagttatgtcagagaagaaacatggtgcagatagaagtgggtcaacagatgtaagcgtcttactttctccccaacataattatttcattaactatgaagactctagacgtttactttgtaggaacaggaaagttcatttcttcacaaattgcaaatccgctagaaaaagaatgaattcagaatgcaggtggctctgtaatgctttagcatgtgaaagcctctctggctgtatccaaagcccttggggattttgattacaaatgtatccatgggaaaggtcctactgggcagcttgtctcaccagagcctgaagtccatgacactgaaagatctgaagaagatgatcacttcattatccttgcatgtgatagtatctgggatgttatgggaaatgaagagctctgtgattttgtaagatccaggcttgaagtcactgatgaccctgagaaagtttacaatgaaatagtcgacacctgtttgcataagggaagtcaagacaacatgtgtgtgatttttttctctggtttccaaatgcacccaaagtat

SEQ ID NO: 481944 - DNA, 1000 bp, Homo Sapiens
cgagcaaaagtgtttatttttctccttcagatatacaatctattggggattccgtgccactgaccaccatgtacaaggaagggattcacaggcaagggggacaggtgagggcagcccccacttcactcaaggaacagggcaagggggcccagtacagagaacagaaatctcttacgacagcatcgtgccctggcagaagattctgcataatcacctagaaaattcaattctaactgaattgatggaataatagatttgaaccaaaataatttacccagttctaataagtacagaaactatacaattcacagctgggcagtcccaagcagtctgctttccagtgggaggtggaggaggctggggccttcccctcccaccaagggctgtgttgtgcccactggggacgagtcccactgaaatctccaggagaagaatgaccccgccctccgcagagcaggcttagggctggacgggagagcggtctgcatgccaggggtgagcagagccacaggtctccatggaaatcatggagaagggagggaagtgggcaggagagagggcagcctctccagctggaggagctgcacttgtctccacagggtgggcgggcagccagggtttctatgcccaacacacaccttatcctcactcacagcagcccactggcatggggggcatgtctgctcacctaacgttttctggcggatttctcatggcccagcgcaacaactgacattccctactgagcaagcagctccgccagtgtgccctgccccagcgtcccgccatctctcagcccctggatgagcccagggaaccggcactctactgaggacaaagcagggctcacctagcaatggaagctcttcaatacttaaggtagctaattcaatgtttgtaaaaggcatttacaacagaaaaccaaagattgaacttcagcttcagatttgtaaaccattcacatctctgcaacttaaaacagtaaataaagattatcaat

SEQ ID NO: 481945 - DNA, 930 bp, Homo Sapiens
tttttttttttttttttttttttttttttttttttttttgagacagggtcttgctatgttgcccagactggtcttgaactcctgcctcagcctcccaaagtgcaggattaacaggtgtgagctactgtgcctggcccaaaaaatagttattttctattatagaagtaatttagtttaaaaaagcacactatgtggaaatcttgattcttacttcaaggtcatggctcatgggcgaccatctacctggtgccaggttccccaaaagtgctggttaactataatagctatgaggaagccagagactctacaagggtagtttttaaaagtctaaacttataaactggtacacataaaagcagttatacaaggcacaagaactgtacaaaagagacatttttacatattactttaccttttttgtaaattctgtagttgtttccataagttgcttttcttgatctgtaaactataggatatgaagcagcaggaagttaaaaaaaaagtctaaaaataaaaaaggagtaagtaaccaagaaagtacatttaaaagaacattaccatatctgttactctgctcctttctaagttgatatccagtttattatctgctctgattcgactggtttcatgctttaaagaaagcaaagatatttaaaaaatgatcttgtaacgaatatttgttctgaaattaacagctagaaaaaaaattcacttaccattagttgttgcttaacttggtctaattcaattttcattttctaggtacaggaaagatcacatgcaattagcattaaaccaagtctatattatgattaaaaaaatctgaaaccctagattaccaaaatttggacaatctatggatttctaatacagaattgataaggaaaaaaaaaaaaaaaaaaactcgagactagttctctccctcgtgcc

SEQ ID NO: 481946 - DNA, 1000 bp, Homo Sapiens
tttttttttttttttttttgtatttttagtagaggcagggtttcactgtattagccaggatggtctcaatctcctgacctcatgattcgcccacctcagcctcccaaagtgctgggattacaggtgtgagccaccacacctggccctcatttgtagtcttctatactataagtgatttgccacaggaaagaccaaaaactactagaactagcctactacaaatgcctggattcaaattaaaattggttttttttactgcttagtaatcttttactcacttcttaatgtccacatttgttgttccagaccttcacttgacattaacccacaatcccatctgcctctaaatctcattattcattaggccgcatctcctaaatgtgtttaatggttgatattaaggtttctctgaaacctcaagtttaagattacaatgagggtgaaacaaggataaatacaaatgtaacatttaaaatcaactacctgtacaatgtcccactttaaggaagagctggtaaatgggtggcaagaagatatagtaacagttaagttcattaaggtaactggaaaagcatgtatattaatatatctaactatatcacctaactgttacatgtagataaagctaacctaattgtacagcaatgtaatgagtctgaagaaagaacagtataaatgaagacagagaacctacagagaagatagaaaagagcaaaaatttggctagttgtcttttgtatgtgatctgtccaataaacacaagcattccagtctgcttagggtgaatatccttgggcagaatatacatatatgtatatatatgtgtatatatatatatatatacacacacacatacatatatacacacacacatacctacatatatacatctaactgaaatctttcttgaactttaaacccatttttcaaactgcttacgtgaatgccccagagatatctcaaaacaagtacaaaattaaattcattatcccatctagca

SEQ ID NO: 481947 - DNA, 1000 bp, Homo Sapiens; identical to SEQ ID NO: 308661

SEQ ID NO: 481948 - DNA, 1000 bp, Homo Sapiens; identical to SEQ ID NO: 308662

SEQ ID NO: 481949 - DNA, 1000 bp, Homo Sapiens; identical to SEQ ID NO: 119981

SEQ ID NO: 481950 - DNA, 1000 bp, Homo Sapiens
ttcatgtagatgtgtactttaattctcctaagtaaataataagggtattaaattgttgggtcttggggtaaatgtatgtttaactttttaaatatacaggtttacaaagtagtcaaattttatattcctaacatcaatgtgtaagtttcatttgttccacattcttaccaggactcgatattatcagtctttttaacaaagacttttgttactagtaaatttgtagtggcatcttatttttattttatttacattttcctaactgctgatatcaagaatttgccctgggtttactaaaaacttatatgttctcttgtgttgaatacctgtttaaattctctaatgaatttttaattgagttgtttcttttattattgttaggtagtaagtgcttattatgtaattctggatacatgttcttcatcagataaatgtgttccctatattttctcatagtctgtggtttctttttgatttactgaatttcatttttgaagagtattttttaatcttaataaaatattttattaaatctttcatttcatacatcactacttattgttccatttatttatttatttcatttttaaatagctatattgaggtataacacatataataaaggtatgcactttaagtgtaaaattttatgatgtattttgtaaatttgcagagttgtgtaaccatcttaatccacttttagaacacttgctttactccataataattctttatgctaatttccatttaaccagtattcttgttcctaggctagcagatcactaatctactctctctctctcggtttaccttttccagataattaatacaaatggagtcatacaatatgtggaattttgtgactggattcttttacttagcatatattatttttaggttcatccacattgtactcttagttatatttatctttttgttaagtagtatttcattgtatggtgaaactacattttagaattattcacatgttgatagaatt

SEQ ID NO: 481951 - DNA, 1000 bp, Homo Sapiens; identical to SEQ ID NO: 119982

SEQ ID NO: 481952 - DNA, 1000 bp, Homo Sapiens
ggtaatcttgagacatgccaaactttgagaaccactgctgtagatgagagattctcaaatcttattgtgcacataaatcaccggaggaccttgttaaaatgaagatgttgcttctgtaggtttggggtgaggcctgtgctcccaggcgatgccaatactggtagtcaatgactacattttgagtagcaagaatccagagcagtgtttctccaatttgctgtgctctggaatcacctgggtagctttacaaactacagaagccaccccaagagatttttacttaattggtgtgggttgtggcctggacgttgggattttctttttacattacccaagtcatgctaacgtgcagccaagttggagaagcttgaaactcatcattctcggtagttggctaaatttaagtagtggcattctcaacatagcttccgccccatatatagcaacccaacagcacccaagatgaaaacagggctgcgaacatgacagacttcagccagcagacctacattccacccaagctttgtcatgaactctgatcttaagcaagtcacaaatctgagtttcaatttcttcacctaactaatgaggacaggaacccctaagataattgcaagaataaaatgagagaatatttgtgaaggtgctttggaaaatattgtatcttataagtcaacacatacataacccccatttttcactctgtctacattgcctaagagaaatatatttcacttttaccactaaaacatgttgaaacagatgtaaatgtggtagcacatacttagttcaatttctagcagagtgcataatgatgcagttccaggaatgcactgtcataagagtggaagcacctgtaacaatcgaaggattagtaaaggattacctgctccaggaagaagacaaaggactgccatttcccagggttgtcagcactgccttttgccattaacttcaaatatacttaatgaaaacaaggaggcaggttcacagctgtaag

SEQ ID NO: 481953 - DNA, 1000 bp, Homo Sapiens
gggggcagaggaagcgccgggcgctcaccttgcggccgttcacgtagaagagcagctcggacgcccggtccattgtggtgtccgcgctggttcgagggcccggagcgggaggcggaggttctgggaagtagcgggcacctgggacccggcggcaccgacccgccgagtggggcggggcttgctggagcctaaagtccaacccatccaccccgacggagaaagccttgattaagatccaacgttcctgagctctttgccaggaactcttcccgggacaccagcacgtgtgtgggcgtcactggcgccctctatgtgggcggaaatcatccggcgaagatgaagacgaccccttcatctcctcgccagtggggcttagcgtctgtgtcacaccctcttgcgtcttagcaaacattgtaagtcctgggacattgcttttgatggtcttatgttactgcatattttaggtggtgttccagctggatttaagtctgggaacattagtaactcccctccaaccaggcctgctgtagtcctggactcttaagtgtaaacaatcatatttattccaactctgcaagagcggatcttagggaaaacaaataggtttacaacttgatcttttagaaatataaggttggtgcaaaagtaattgcggtttttaccatcacttccaatggcaacaactgcaattaattttgcaccaacctaataattactggttttaaaatgaagtgctatcttgatataaacttaaaaattttatcactatttacagtttatccagtaactaaccacaaagtttatctggtaaataagaacagagatgtaaaacatcttggaaaacttaaaaaaaaaacttggaaaatacagcaaagcataaaaataaagaacacctgtaagcccacaacttagaacttaccaccgttcacttttttagtctatccttactttttgaaacatgtacttttaacacctttaaaaacttaagtgggacaaacta

SEQ ID NO: 481954 - DNA, 1000 bp, Homo Sapiens; identical to SEQ ID NO: 308664

SEQ ID NO: 481955 - DNA, 1000 bp, Homo Sapiens; identical to SEQ ID NO: 119983

SEQ ID NO: 481956 - DNA, 1000 bp, Homo Sapiens
ctgatattcaaaggcaaaggagaggtatggtgtgcctacaatcccagcacttcgggaggctgtgttaggatgattgcttgagcccaggagttggagaccagcctaggcaacatagtaagaccctgtctttacaaaaaatttaaaaattagctgggcatggtggcaagcccatgtggtcccacctacataggaggctgagatgggaggattgtttgagctcaggaggttaaggctgcagtgaaccatgatctcaccactgtactctagcctgggtgacagattgagaccctgcctaaaaaaaataaaaaataaaaaataaaaaaacaaaggcaaagcagagaaagtcatggtctgtcaggttttatttatagagtctggtgaacttgaactagagaaagctgcaaaaagtggtttggagagcatggcagggccatggagaagggctaatagaagcaggtcccttgcccagaccctcagggagcccttttggtggatagcggacacctgaggcaggaggtggcaggggcaagtccaggcaggcagcagcagggctgcaactgagagctgaggctggagaggtagcgctcgccctaacctgatcctgcaggtctcaggccctggggtcatatactcgccccatgaagacagggaacttgtgctgctggtcccagagcacgaagaggaagggctgctgcacttcaaagaccagcagggtgcgggccacagagatggcggaggctgcagccgcctccaccccagtctctgtcagttccagcactgtctggtgctgcatcgcagaaacctgaagatctgggtcctctgtcagcccacacaggttaaggtcataagaaaaatcgaagaattctagggcaaaaccagagaaaaacagagtcagaagccagcatgataccctcagctgatggagacctttgtcctgaattctctgggttcatcctgagtcccagtgctctcttcctcttcccttgtttgccagattaca

SEQ ID NO: 481957 - DNA, 1000 bp, Homo Sapiens; identical to SEQ ID NO: 308666

SEQ ID NO: 481958 - DNA, 1000 bp, Homo Sapiens; identical to SEQ ID NO: 308667

SEQ ID NO: 481959 - DNA, 1000 bp, Homo Sapiens; identical to SEQ ID NO: 119984

SEQ ID NO: 481960 - DNA, 1000 bp, Homo Sapiens
ccctggccatcctacccaggagaagatggaaaagaagctgaaggtgatggctgccctcacagagtcggcccccaccagcacgtccttcgggttggtgactgcccactggttggtgaggaagcagaaaccaacaaaccacaggaaggtccagagagctgggggaggacgggtgaatcgtcagttccatggaaagggaggggctttccaggactctgggaggggacgcgggcaggtagggcagggacctcccgggggagcctccacactatggaggggaggacttggaagccgggccgggagccacctccaaagtcccccacactcgggccttggcagggtgggccacagcagacagcctaggggacaaaaggggcagaggcaaagcccatctgctcgggtgtgctgcaggtccactcagcttctagctaccccaggcagggctggtgccattccagcacggaaaaacactagctgaaaaccctttcctaaaaatgccctggaggagtgagctgctccctgcccctcccagagaggccgagaccctcccagctgcggaaccctagagttaatgcctcccccaagatcaaatggaggtgccacaggcagatacctgagaagagcaggtcaccaatgaccaggtacttgcggtcagtggcgttgctgatctgggggaaatacgcgtcgaccaccaagaagaaggccgaggccaggaaggccagcaccccgatggcactgccatagcggcaggcatcctcgttgcggttgaacacgcagtacatctgcttagactcgtgggcattgctgtagccctcaccatagatgcaggagaacacgatcaaggcgaagacctgccgggaggggaggacctggtagggctggtggccgcctgaggggcacacacagcggggaccctgatggggtgtacagatgctggcctctcccactactgctgtccccttttgggtttttgttgttgtttgagatggagtcttgctcttgt

SEQ ID NO: 481961 - DNA, 1000 bp, Homo Sapiens; identical to SEQ ID NO: 308670

SEQ ID NO: 481962 - DNA, 1000 bp, Homo Sapiens; identical to SEQ ID NO: 308671

SEQ ID NO: 481963 - DNA, 1000 bp, Homo Sapiens
ggatccgcccgcctcggcctcccaaaggaaatatatttcttaaatgaaagactggcaaatcgaaaatactccttgatccatgggaagcagaatggatgttgttagtagacattaaaacaacattaacttctttctgcacctccatcaaagcccatgggtgaccaggtgcgttgtcaatgagcagtaatatcttcaaatctttttttctgagcaataggtcttcacagtgggcttaaaatacttagtaaaccatgctgtaaacagatgtgtggtaggcagagtagatttagtataattctttttttaattgtaatttttttaattggaaaacaaatacacaacttggaatggatttgaggcaaattgtgccataagcacattttctttaagtggctaaacaaagtttaaaaagcaagtaacagtaaaagaaaatgtttctggtacaggaccagcagtacagaaaaaacagtgtgtgaggtacctgggagtacctggataatacacccattctgcagtagtgcaacttttaagtacatattgttggctgtccgtagtccacacagagttacaactccatacttcaacaccatgctgacagttcctaaagaaaactactttaaaaaaaggcataacccggatgttcccttatttgaccaactccacctaagtttagatgtgcagaagggcttagatatatccggagtaagccacaggcaacatgttacttcatcagttttctaaaataaggtttcagggcaatgacagtaagggaagaacacatggaggaatgaagtcctgattaccatacatgcatatttttttttgacagtagggagaagccttttacagataagttacaaacaaaaggcaaataaacagttttgtgcaagaaatttaacacattctgtacaaggtcttcattatgctgtcatcatttgtacaaactcatagtttacttgaccatcaccatcaggatctgcttccctgatcatttaatcaa

SEQ ID NO: 481964 - DNA, 1000 bp, Homo Sapiens
ttttttttttttttgaaacaaccacattttgctttattaggcgttccatggtaatataacacagagttcttaaggaataataaacacgagacttgttttttaccataattattttgccatcaagacagtggttacaaaaaaaaagtactcttctggctacacactttatcagctttagaactgaaagttcctccactcatgggtcacaatcacaatttccaggattaaaaaccatctattcttaaatcctacactgttttagagcatcaagtcactgcagaaatcgtcaggttttaacttgttttttaagaaaacaaccaaaacaaccaaaaattaccatgacccggtacaggaaaaacaggaagactcaagtgaatactagagctgcaagtgtttcttagaattgaaacaaaaattgtttttttccaacttgttcaaatttcctctaagtgcaggtgagaaaaaaagcaaatatattaagtcaaccaattatttttttaaaagtgcaatttacctttaaaataacaaataaacaacaacaacaaaaaacccaaaaccccaaccagatccccaaaggcaaaatgtgtagagagacaagggtggtgatggaatgacctactttgtgatgtttttacgctttacaaaaagcagatttggtattcagaaaagcctgcaaatacaacattgcttaagagaacctgtaaacacgtttggaatacaatgcaacacaagtcagcaaggacaggggtaggtccaaaggagccagctagggggaaaggtgacagaaaaggagagggaaggatggagacagacatcgcctgtggtctctaagggggccatgtgtttaatttataaggtttcctccccacaggagttctgatgtgatctatcgttcataaaacacatttctcctcttggcaaagtagaatagactttaagtttcccaatgactttttgagtttatagggcctctttctatgtagtgtgtctttagaaataa

SEQ ID NO: 481965 - DNA, 1000 bp, Homo Sapiens
catcgtgatgtcttatttaaggggaacgtgtgggctatttaggctttatggccctgaagtaggaaccagatgtcggatacagttcactttagctacccccaagtgttatgggcccggagcgaggagagtagcactcttgtgcgggatattgatttcacggaggatggtggtcaagggacccctatctgaggggggtcatccatggggacgagaagggatttgactgtaatgtgctatgtacggtaaatggctttatgtactatgtactgttaagggtgggtaggtttgttgatatcctagtgggtgaggggtggcgttggagttgcagttgatgtgtgatagttgaaggttgattgttgtacttgcttgtaagcatgggggggggggtttgatgtggattgggtttttatgtactacaggtggtcaagtatttatggtaccgtacaatattcatggtggctggcagtaatgtacgaaatacatagcggttgttgatgggtgagtcaatacttgggtggtacccaaatctgcttccccatgaaagaacagagaatagtttaaattagaatcttagctttgggtgctaatggtggagttaaagactttttctctgatttgtccttggaaaaaggttttcatctccggtttacaagactggtgtattagtttatactacaaggacaggcccatttgagtattttgttttcaattagggagatagttggtattaggattaggattgttgtgaagtatagtacggatgctacttgtccaatgatggtaaaagggtagcttactggttgtcctccgattcaggttagaatgaggaggtctgcggctaggagtcaataaagtgattggcttagtgggcgaaatattatgctttgttgtttggatatatggaggatggggattattgctaggatgaggatggatagtaatagggcaaggacgcctcctagtttgttagggacggatcggagaattgtgtaggcgaata

SEQ ID NO: 481966 - DNA, 1000 bp, Homo Sapiens
ggaagattatcaaatagctggtctttcagacagatgaaacattaagcacttatacctacacggcctttctctagctatgagaactcggccaaccacacccatgccagcatcgcccggcctcccatgcgaacagagctgggctccacttgtcttgtccacttgtttcctctgtcctgcatcatgaacttttgccaccactttgcctgacccaaacttaatgcactttattaatagtcaacatgactcaggctctagtactgtgctccttcaggacccagctgggactgaaccaggctacctggtaaaagcgaagggaagccggtttaagacttgtctctgcctcctctatgctttgaagaaggattcacaggttttgctggggatgacaggaaattcaactgaaatggaaatttacccacattaattccacacctgataacagggacataccctaaagatgggaaattatggggaaaaattttcaggtacagcagctgcatactggaagagagacctgtagcattctagttgtgtttcaaatcagcgtccagttggagaaacactttgtctcctaagatttaaagtaggaaattagaaataaatactgacaaatacctgacagtctcagtgttaaggtagtgttaatttttttaaagttctgatgcaagaacacccactgagagcggccaaaatctgggaccttggctatgcataatgccaaagagagccaaacacaccaagcgatgagccacttacctcaatgaacatgtcttccacaaaacaagcatccagtgccttcaacacaggcatacgtcaaaaattcctggtccagggtgaaagcccagtaggcatccacaggctggttctcagtggattcatttggattaaggttagtcattaaaagggaggataacaaataagctatcttcttagggtttcttctcttgttctttgtactacaaattacttggtgatgtatgttttcacgcaaggaaacagg

SEQ ID NO: 481967 - DNA, 1000 bp, Homo Sapiens; identical to SEQ ID NO: 308674

SEQ ID NO: 481968 - DNA, 1000 bp, Homo Sapiens
tctattttctgtgagatattctagacatttttctcaagccatccattgaatttttcatttctgctgttgtgtgtatgtgtgtgtatgtgtgtgtgtttattttaaagcttattttttgtttcttgtctcaaaatagcatcttattcttgtttcatgggtgtaatatcacctcttattctttttttttttttttttttttttttttttgcatcagaaagccttatttccatttggtccaaggcttgttagggtagttaagaaagctgcctattggctggagggagaggcttaggcagaagccctattactttgcaaggggcccttcagaagtcgctgggctcataaggctcttagacgtgcttgagagtgagcctttcgaagagatactcgcccagcccagcctctgggcctcccagcctgtggaggttcgtcaggtggtcacccatcttcttgatgagcttcacttcctcatctaggaagtgagtctccaggaagtcacagagatgggggtccatgtgggcagaatccagggcatgaagatccaaaagggcctggttcagctttttctccagggccatggcagctttcatggcatctggggttttaccccactcatcttcagctggcttcttgatgtcctggaagagagcgcggccgccacgctggttttgcatcttcaggagacgctcgtagccctcgcgcttctcctcggtcaattcgcggaagaagtggctcacgccttccagagccgcatcatcgcggtcgaaatagaagcccagagagaggtaggtgtaggaggcctgcaggtacaaattgaccaggctgttgacggctgcctccacgtcggtggaataattttgacgaatctgggagctcatggttggtcgccaagaaggagctaacgacaaaaacggtgctggcaggtcccagaagcaggagatagccgagaagatggtcccggaggttgcaagtggagaggaaattggagggcggtcggagg

SEQ ID NO: 481969 - DNA, 1000 bp, Homo Sapiens
ctcccatcccactcctctcagcagcccctccgcctgattccacagattccaaaatgtctccaaatgaattaaagaagccacagtcaacccacatgaatgtgccaacaagcattttcatttctttattttaaggacactgggaaaggagccagtcccctgaagagaacactctggtcagttggtggaggccagtgggaagccatcagacctgctttccaggaggggtgaagggttggtgcagggtgcaaggtgagagtgaggttaaaggtcagagaggaggggctgaggaggccatctcccaccaggagcagacagctggtggcttgagactggggtggagctgcgtgggggatgggaggggactgagcatggggcttcatcttcactgcccgctcctcccctctccctggctgtgcccgccttctgggattgtaggattccagcagctggcgccccaggtgctgctgcggctgaggaagacaatcccagtcagctgccttctcaattccagggtggctgtagccagaagcaggaccagataaggacatggcctctgcattaaagcccagatcccaggcacggttggaaaggctgggcctgggaagtggggatgatgagaggaccccgactgccccacaccccagcccccggccccagggccagggagccgcctatgtctgcacgtgggtcagctggatgtcgccacccacttccagtttgttgatggtgggcaggttcctcaggcgatggtagtattcaaacacgtgctgaccatccacggccaccttgaggcagtgagcttcacacaagatccacacctgtgcagagattatgccgtttgcactacacttgggaagtcctccaccctcactgcagcctcctctctccctccctccctccctcctcagttgttaataagcccctcacctgcactctatccccactgagcgaccggctcttcactaaacaggctgtgcgtgctccttcccctgtactgttc

SEQ ID NO: 481970 - DNA, 1000 bp, Homo Sapiens; identical to SEQ ID NO: 308675

SEQ ID NO: 481971 - DNA, 1000 bp, Homo Sapiens; identical to SEQ ID NO: 308676

SEQ ID NO: 481972 - DNA, 1000 bp, Homo Sapiens; identical to SEQ ID NO: 308678

SEQ ID NO: 481973 - DNA, 1000 bp, Homo Sapiens; identical to SEQ ID NO: 308679

SEQ ID NO: 481974 - DNA, 1000 bp, Homo Sapiens
gatcatcgtaagacttttttgtagcaataagacaccaagttccagcctaactaatacagtatggaaagaaatcaaagtattttaccctaaaatatatttctctgacatattttgaaatggccctgcaaagctatctcttgtggggaaaagctacattctacagagattccctttccaggtcttttccctgattcaggagagaattaactaagagtctggcacctttttaagtctgataagaaatatttacaatctattttctctgaagcctgctacctggaggcttccttgataaacccttgatctccacaacccgtcttaagcaaaatattcctttctattgattctaggtctttagataactctttcaatcagaaaatcttttttttttttttctgagtctcattctgttgcccaggctggagtacagtggcatgatctcggcttactgcaacctccgcctcctggattcaagtgattctcccgccttagcctcccaagtagctgggattataagcacccactaccatgcccagctaatttttgttttttgttttttgtttttttgagatgcaatttcgctcttgttaccaaggctggagtgcaatggtgcaatcttggctcactgcaacctctgcctcccgggttcaagcaattctcctacctcagcctcctgagtagctggagttacaggcacctgccaccatgcccggttaatttttgtatttttagtagagacggggtttcatcatgttggccaggctggtctcgaacacctgacctcaggtgatccacctgcctgggctcccaaagtgctgggattacaggtgtgagccaccacacgtggcctaatttttgtattttttgtagagatgggttttgccatgttggccaggctggtcccaaactcctcagctcgatgcaatccgaccacctcagcctcccaaaatgctgaaattacagacgtgagccacagcacctggccagaaaaatctttaaa

SEQ ID NO: 481975 - DNA, 1000 bp, Homo Sapiens; identical to SEQ ID NO: 308680

SEQ ID NO: 481976 - DNA, 1000 bp, Homo Sapiens; identical to SEQ ID NO: 308681

SEQ ID NO: 481977 - DNA, 1000 bp, Homo Sapiens
tctagcctggatagagcaagaccccatctctagaagaaacaaacaaacaaaccaagaaacccaacaacgggaaacatcttcctctagaatgggggtcagaaacatctgtctgccttgttccctggtgtctctccagcacctagaacagcgctcagcatgagtatgcactcattagttttttgttgaataagtgactcgtttgacacagcaattccacttctaagaatctttcctaaagaaatattcatacacatgcagagagctgtgtgcacaataatgagaggagcaaacaactggggaacgtttgcaaatgtttattaactgtcagtgactgatagaggggaatcggatgaggggagtacaagcagatgggagatgcttatagtgttacttggtgtttgtgtgtgtgtgtgtgtgtgtgtgtgtgtgtgtggtgtaaatgcagaggaaaaaatctgaaattaaacactcagacctcccctcagcagtcacatctggggagagaggagggtagtgctgttctatggagagaatacctgactatacttgttttctaaggtaggtgcatggatacacaaaccgaaatatgcattaagtatgtcttgctgatcagtgaaaatgttaatatctaacagaatggcacactgtaagaaagtacaacgtaaactctaacatcgaactcttggcacactaagaaaaatgacgctcaacttttcactgttgtgaacacttgctttcacttgctatgcacctgatgacgaggggtccacagccatgcccgtgttcatgaaaggtcaccacgttctgcttctcatcatgggcatgtgtcgtatccccgaggctgaggcaagaagagagaaggaaagtaagtggcagtgagttcccaccacgtgacaactcaacctcaactcctcctgacctgcagaccctgcacactctgattctgtcctacctcaggacctgcacacgccttccacggttcctcgaagtgaaccatctg

SEQ ID NO: 481978 - DNA, 1000 bp, Homo Sapiens; identical to SEQ ID NO: 119985

SEQ ID NO: 481979 - DNA, 1000 bp, Homo Sapiens
cctcacccaatacaattacatagtcatgtccttgcctccccaacaagggtctgtacatctttcagggcaaggctagctccagggaaactactaacaagagtagccaaccccctcctaaagactcaaggctgctttgcccataggaaacctgttatccccaatcaatacttctcccagagatccctggtttcctgttttcatctgacttctccccatggccttactcaggaacagataagccccggatggagaaatgcagcacctgattccaggtgactgagtgtggccggccttcactgatttctccctccacaagaccaaaggtcctgtggctggaaagtctcattctgtttctcttgcaggtcagactagtcccggtgccatgaacggagacaacgactgtgcaaagagagctagggatgatgctcaaataccagagaagatacaaaagctgaggtgacctggagggggcatagtagtggcccaggggacagtgtggggtgacctggtttctgaggaggggaggacagagacactggagacaaggagcagggtctcgggggagatctggatccttgggaacttcccaccctcgctctgtcatcacctagcatctctggagacaagtctatgactgtgcacttcatttggtgaatctcagtccattctggaaggtgggaagagagccagccagcagcattaaagccctactgtgtggcaggggagaagctagggtaggtgccccttgttctgtcagttagccatggcatcaaccaggaagaattatcatccccagttcccagatctagcacacaggaagcggctccagctgaatggcagacatgcctagctgagtactgccagaattccttttttttttcttctaggccttcaatgatattgccaaatacttctctaagaaagagtgggaaagatgaaagcctcggagaaaatcatctatgtgtatatgaagagaaagtatgaggccatgactaaacta

SEQ ID NO: 481980 - DNA, 1000 bp, Homo Sapiens
aagttacctgttatttatttatttacttattttcccccacaccaatctgcattcactttattcttctgtttatacattctcttgctcccagatttggaggcagaacgtaatatgagctcaacagtcctgcacagagccatgtaccatatcgcatcagttttccttttcccaacccctattccacccccactcagtaaagccccttgtccaggtgttgctcttgggggtaagaaagcagaaaagcaggctgggcgcagtggctcatgcccgtaatcccagcactttgggaggccgaggtgggcagatcacctgaggtcaggagttcgagaccagcctggccaacatacagcaaaaccccgtctctactaaaaaatacaaaaattagctgggcatggtggtgcatgcctgtagtcccagctatttgggaagctgaggcaggagaatcgcttgaacccgggaggcggaggttgcagtgagccaagatcgtgccactctgctccagcctggacaacagaatgagacttgtctctcaaaaaaaaaaaaataaaataaataaaataaaataaagaaagaatgggtagagattccagtgagtgatgggagcctctttccaaggcacaaggcgccaccttctcaatatggccactgctttgttcagatttgggcagtgtgctggccaggagctgggggctgcagtacctccagctgactgaggaggcaagcattgtgagggtgctgctgcaggtccacagtcatcattgaggccaggagctgccacactcctgaagaatgcgtggggctttgtgggatgctgagttggttctgcacagcaagggccacactgtcacgtttcttgaacaccatttcgtaagggccttccccaaacattgtggcatatatcacacagcccagggaccagacatcagtctgttcatcaatgacacagtgactgctcagggaagagctctagggctcagtaggagatggtgcactgctgggt

SEQ ID NO: 481981 - DNA, 1000 bp, Homo Sapiens
gctgagatcacatcactgcactccagtctgggcaacagagcaagactctagtctcaaaaacaaacaaacaaacaaagaaaacaaacaaaaaaaaacccacttatacctggaactgatattcttccaattaacttttagtcttgttggtaaaggccgttcccagatatcactgtctgttagcagtgggttcacagagctgctatagagatggtgtttccggtggacagtgtccaggttcttggtgtcttgaacaaagaattggacaaaacgcacaaacaaagcaagaaaggaatgaagagatttattgaaaaggaagtgcactccacagtgtgggagcagggccgaacacgggctcaaaggccctgttacagagtttttgtgagtttaaataccctgtacttggggtacgccctgtgtaaatgaacaggatgaagtaaagttacaaagtcatttactcagtgtaggccctatggagaggacatttcctgtcatagctgaagtgtgaattggccttatgttccctgtctccagactctattttcctgtttcatcagtgctgatgggtagagtgatttggtcagtaaaggtgagcagtgctgttctggggccttcccacccgtctgctcatccttacacatctgaacatagcagtcaatcagatgaaaccatacttgccacataggacagagtgcaatctgaatttaccatcttggtatttgattggaagattagttggtccagctgatgttttaacagatattgttagtaggtcgtctgaatgggagctatctctaatcaaggaatttcctcctggtgcctcttttaatttctctttggctctgtggacatatttcccccgtaccatcctgtgggagctcctgcagggccttgccagacacgcaccgtcttcaggcacagctcctcagtgaccctgtggtctccctgctggctccgcgtcccttccctgccattcctggagggctccagacaccgcagggtc

SEQ ID NO: 481982 - DNA, 1000 bp, Homo Sapiens
cacatctaattttagaacttttttccatttgtgaagtgtctttttattagttttatagaactcttggtttgccattgatttcttttagcattttaaaaatttaattcactttatttttcttgtataaaaatcctgcattgtataatagccatagctggagcctgggttctctgcagtggagactctggtcagtgaattcctagtttcctaataggtagacttggtgaatatggtctccttccagagcttggggatcagatagctgtaggtctttgagatgacattaacagtggccttggtgaagttgcccagggtggcagtgcagcccctgactgaggtgtggcagtccttaatgccagccatcatcaacagctttttgggcacagagatcaagatgaaaccattgtctctgtgtgtagagatgaggtgtaccagcacagagttgcagtggtctgtcaccttgcaaggaatgccgtggggcttgccagtgttgtctcctgagatgcctctctgcaccgggacagtggagagcttgacaaagatgatgactccttggatggtagtaggtaccgtcttggagcatttaacacccagaccgacatggatattttagtccccaatggcaacaagtgccttgaatctggaccactggccagtgcaagtctccatttttactggcataatcttaaactcattcgtgagggttgcccccaggaaaaagtcgatgatctcagcctccttgatgggcagggagaggagatagagcttcagggacttaatcttcatgtccttgactatgctgcccagtttgatgatggggacctactccttggccttggccttggccttggccttgccaccaccagctccgtggccccagccttagccctggatgccactgctgtggcttcccattttggggcctctaggccctcccactgcactggtctcattcgccatttggtgttttcttggagaactcttttagcattttaaagct

SEQ ID NO: 481983 - DNA, 689 bp, Homo Sapiens
tgtacttcatgtatggttttcccaagtcattaaatgtacatacttctgcaactttttattttttattttttctggtgaaaagatatacatatatttagaattagccagctggactcagtttagatgaccccaattttgttggcaacatccaaagcatcataatcaggagctagttgaacgtatgcctccttctctccatcaggccgaatcagggtgttgaccgggccacatcaatgtcatagagcttcttcacagcctgtttgatctggtgcctgttggctttaacatctacaatgaacacaagtgtcttgttgtcctcgctcttcttcatggcagactcagtggtcagcggcaacttgatgataatatggtggtcaagcttgtttctcctgggggcgctcttctgaggatatttgggctgcccctggagtcgcagtgttttgggccgctggaaggtgggtgatgtgtggatcttttttttttccggctgtggacgcctttcaacactgctttcttggccttcacagcctttgctttggcttcggcttgaggaggggcaggagcttccttctttgctttcggtgccatcttgtgaaaagggctctgcagcttttaatgtgtacagtttccatgatatgattgtaccagattataagattatgttggacatttgagttctttccaattta

SEQ ID NO: 481984 - DNA, 1000 bp, Homo Sapiens
gagatgtagtctcaccatgttgtccaggatgatcttgaactccttacctcaagcaatccttccgccctgacctcccagagtgctaagtgaggcatcacaccaagctgtaaagtcttttttttttttttttttttttacaaacagtccaggggtattttaacacctattatgctatgaatccatagagaataggttccagcagctcaggctccttcccatttgttctcacaaagtgtgcttctctgggtggggcaggctggcacttcagttgaactcaggtacctttctctttgggttctttttctgatcattttactacacgtttcaggaagctatctcggctcttagagtgcttaatgtgctcaatgcgcacattaattctcttggcaagagtcttgcccttaacttacttgttcacaacaatgctaacagcatgctggggaacactgtagactcttccagttttgccatggcaacatttatgggccattcctttttgaacagtacccattcccattcccttaatgtcgacaacatcatcctcctttttttttgagatgcagtcttgctctgtcacctaggctggagtgcagtggtgcaatctcggctcaccgcagcctccacctcccaagttccagcgattctcctgcctcagcctcccaagtagctagaattacaggcatgcaccaccacgcctggctaatttttgtatttttagtagagacagggtttccccatgttgcccaagctggtcttgaactgctgacctcaggtgatccaaacgcctcagcctcccaaagtgctgggattacaggcatgtgccactgcgtccagctgacaatatcatccctcttacagatgcgcatatacatggccaaaggaaaaactccgttttctaaaaggcctagaaaacatctatcaggtacttctcctctttccctttgtcttcgtcattttcgcaaattactggaagatggcagttccagctgaaaagcgcagt

SEQ ID NO: 481985 - DNA, 1000 bp, Homo Sapiens
catataatgaagaataaaatgcaaattttattctaggtatgaagggaggttactgaaaatttggcacagagggaatgatgtgatctgatttccatttttttcatggtttcaatggacacttttattgtctatttaatggatcatcaatttcgtctccctacctacaaatggaatttcatcttgtttccacgctgagtagtgaaacagtgacaaagctaatcaggataagctacatcaaaagagaactaagctaacacagctcactttttttttaacaggcaaaatatgcatatatgcattctagaatgcacaatggtttagtcactaagaaattcaaatgggatcttgaagaatgtaggcaaatccagggtgcagtaaagatgagctgagatgctgtgcaactgtttaagggttcctggcactgcatctcttggccactagctgaatcttgacatggaaggttttagctaatgccaagtggagatgcagaaaatgctaagttgacttaggggctgtgcacaggaactaaaaggcagaaaagtactaaatattgccgagagcatccaccccaggaaggactttactgtccaggagctctaaactggcaccacccgtagtgctcacatgtctgattttatcctctgtgttccatttggcacagcaagtggcagtgtttccaccacctatgatggtaatgcagcccctagaagtggctttcaccacctcatccatgagggctttggttccctgggcaaaagcttcccattcaaatacccccacaggaccattccacacaatctgcttagcccaagtgacagtctcagcatacttcttgctgctttcaggaccacagtccaagcccattcagccagcaggtatgccagaagccacagtggcttggccagtcctggcattctcatcaaatttctcagcagtgacaaagtcaataggcaaggtaatcttcacaccattcttctcagcttgggacattaggtctttg

SEQ ID NO: 481986 - DNA, 1000 bp, Homo Sapiens; identical to SEQ ID NO: 308684

SEQ ID NO: 481987 - DNA, 1000 bp, Homo Sapiens
gcagtcaaatctgcaagcagtgaaatctgacccatttcacttattaccatccttagtgtttctctctttcaccgactctgatcttttattttatttcatttttgctggccatgttttatttgttctttttcttcaaataggttaactgaagatgcagatagtatgcaataaaataaaatagatgaaacaaattctaagagactgtgatgccacatgctacatttaacctaattttattcatgcttgccttgggatggggaatagatcattcactaaaaatatacattactaaaatcaaaatatcttatcatgtacaacttttaaactacaataatgatataccttaattacttccatgcacacaagtctaacattagttttttttttttaaataaacacaattaggacttctaggagcattttataataaagcatttcctaatttttctttgtagatagaccaagcacctacaaaatacaaattcctatacacagtgagcacgttagttaaaatgaacacttaagtaaattaagtacttggacagccttaggataagctgacattatatactaagctaggtaggcaacaaaccatagtgtcaaattgaaaaagtgtgtttgcaaataaatttttaaaaccaaattaatttttataattaaagaaaatatactgatacgctaaaatcaataagatgtgatatagtaacacttcactataaagaatgcataccagagcgtttataaacagtgagtgagtcttattaagaatagtttactacaataaacactggctaaatagaagtgcgtattgtgaagcactgtgggtggtatatgttttgctaattactcttctcaccttgaggtagataacacatgtgtatcaaatttggcattcattttcaattgctgctggtatcatgtcttttaagaaatgtgtacggtatgaaaaacttgaaaatactcatgagtgaaaaatgtttttggaaaaaaatagatattt

SEQ ID NO: 481988 - DNA, 1000 bp, Homo Sapiens
attatttaacacttctcacattttatagatgctctacaaggtcacatgcttttaaaatagtagcaagttaaacttcactcttttttttttttttttttttagaaactgatgtttattttccattaaccatttttccatgttgcttaagagcctatgcaagaacagcttaagaccattcagtggttgctcctacccattcagtggcctgagcagtgggagctgcagaccagtcttctatggcaggctgagcgctccagtcttcagtagggaactgctgaataggcacagagggcacctgcacaccttcagaccagtctgcaacctcaggccgagtagcagtgaactcaggagctggagcagtccattcaccctgaaattcctcctcggtcactgccttttcagcagcagcctactcttctttttcaatctctccaggatctctgtagaagtagagatcaggcatgacctcccatgggtgttcacgggaaatggtgccatgcatgcgcagaacttcccaagccagcatccaccacatcaaacccactgagtgagctcccttgctgttgcatgggatggcaatgtccacatagcacagaggagaatctgtgttacacagagcaatggtaggtaggttaacttaagatgcctctgtgagaggctggtggtcagccctgggatcagtaaccacaagaagccgtggctcccagaaggctgcctggatctcgttagtgaaggttccaggagtgaagcggccagcaattggagtggctccagtggcagcagcaaacttcagcacagccctctggccagtattcctggaggatttaacactgacatgagcagggttttcaatggcaacaacagcacaagctgccagagaagcttctcccaggtcctcttcagatttatgatatagatgccatcacttttccttttatagatgtactgttccatctggaagtcaagattggtgctacctaagtgggttcctgctgcaagg

SEQ ID NO: 481989 - DNA, 1000 bp, Homo Sapiens; identical to SEQ ID NO: 308685

SEQ ID NO: 481990 - DNA, 1000 bp, Homo Sapiens
agcacaaattacagcttttcacatttggtaaacactacgtggatattatgtggggtaacatggttgtggaacacggcccatgtcactggcaccctcttaccttctccacggcaggagtgggagagaacctcttggcgcaagctaggaagatgtcggggtctggcttgccacgctgcactttggggtcatctcccagcacagtctgggaaaacaagctgaagatctccttgtggcggcttgtcttcatctcaaacgatgcagacttcaacctggtggccagcgcaaaggggatgccttttttctgacaaccagtttctcagctcctggggagatggagggaaggagtgcagtgaggggtgaggcctccactacaaggccttcttccagggacggtccttccagctgagtggcagcacactctcaggctgcttcttttgaggaatttctgacttaggatagactgtctgaaagggggttctcggctccaaaatatccctgctcaaaataaaccaaaaactcaaaaaagctattggcggttgagcagtgcatttcccaaaggaacagaaaagaagtgcactgggaggcactgctgctttgtctgctgggcctctttattaaatgtggagaagggcaggtagcaggtccaggaaatgactagacctgggatctggccagggcacagggaaggccacagagcagggactcgctgaaccatacttttattccacagcagcaaatacacaatgactgtgctttttgtgttttctgcaaaactgccgtattctgcagaaaacatttcaatcattcttcaccctgctgagaagaggaaatcacacaacgtcctccaccagacactggaaaaggctgaggctgagggactgctgcagcattacttaacaagggattgggacaaaagaaagctgctgaacacagctgatcaacagcaacatgccatatgaaaagagcatcctcacactgtcattagccatatggattaatt

SEQ ID NO: 481991 - DNA, 1000 bp, Homo Sapiens
ggatgtacaaattttctccttctggtttctgttccactgagcactgatgtctttgctgtagatgggctttcgtacgtttatgtcacaggacccgtttgttatctttaacctgggactttatttgtacaactaagacatttgtataaaacaaacagaaaatgaaagaagcattaagccatgggagagtagaaatgggagctgagaaacttaagagtagaaattggagctaagaagatgaagtgaactcctatcctcaaacccgcaagttcccggccccaaaggaagccctcagagactgacatggcttctgggaactggacagcccctctcagcaagcctcattcccaacctgcacctggcctctctgcgaggaaggtcagccccagcctgggaagaccaagagggagccagcccagcatcaccccatgaaagacccaggacccaatgttactgccctaccagggcaaagcaacttgcaaagatggtggctaaacggccaccactaaaggtcccagctcagggaaagcacaggagccggaagcggtggcatgggcagcatttcttactcagtcctccagcacactctgtgaagtgccctgggggcaatgaaaccttctccctagtattcccgatgacccacaaacaagttgctcccatgcacgtcacacacagaaaggccttgcagcagtgaaaagcaggcagcttcagcagccattgaactctccagggttgaatgtgtcccttctctcatttttccacatcgtgctcgttactgaccgatgtctttttgtagcaggacaccaaaaccgtattctctgctcatttgtaaaatctgaaaacaacagcaagttgtgaaaccacttattttcaggcaaacgatattgaatttcctgtaacagagacaaatggcaagtgagaatgcagagttctactccaagtagcctggggccgagagttttttgttagtatgtttctagggcccatcttagtcattaaaaag

SEQ ID NO: 481992 - DNA, 1000 bp, Homo Sapiens
cagccccaacagcctcctcacctgtggctctgatctcaaagtcattcttccttcattttatctggtctcatgtatttatttatttatttatttatttatttgcatgataggctttacttttaaatgattagtagtacaccgagtaataacatgtaacaagttcttgaattctatcatctagttattttgattaagaagctgaaacaattatactagtaatattcactgttctaattattagcagcaatggactactttaaggctggctgatgcttcacacaggttacagaaactactactttttcatagataaagcccctgaccttcaaaaaagcattaaggaaaaaatgatttaattccttccttttttcaaaggattgttttgctttttcttttaaacttgatacaagaaagaaaacatcaacagtgatatatatatatgtatatatattgcttgagccaaaaggcataataaaatagacaatatttacccattatattcctaagaaacatgaggtaaaaagatgaaatctttaagttttttttttttgagacagggtctcactctagcacccaggctggagtgcagtggcacaatcttggctcactataacctctgccttccgggcccaagtgatcctcctgcctcactcttccaagtaggtaggactataagcatgtaccaccatatctggctaatttttatatttccttgtagagacacagtctcactgtgttgttcaggcaggtctcaaactcctgagctcaagccatctgcccgccttggcccccgaaaatgctgggattacaggcgtgaaccaccatgcccagcctagataaattctaagtctgtacaaagaaactggatttgcttctctccgaaaagtgaatgggcctactctataatatacagagataagttaatgtcttcttataagaatataactagagcttcttattccatgagggcatctaaagtgccagtccatttaacaggtgc

SEQ ID NO: 481993 - DNA, 1000 bp, Homo Sapiens
ttattagtcaaaactgcacactataaaagtgctttaaaatgcagcagcaggagatgtgaagacacaaatgaacaagtgcgtagtgacacatagctgtcacaacacagtgaagaatacacactgcctcccccgctttacctagaaaaggagagttctaggccacctcctcctcagcatactcctcatcctcctcctccttggccgtggcatcctgatattgctgatattcagacaccaggtcattcatgttgctctcggcctcggtgaattccatctcatccatgccctcgcccgtgtaccagtggaggaaggccttgcacctgaacattgctgtaaactgctctgagacacacgtgaagagttcctggatggccgcattattcccaatgaagctgcctgacatttttagcccccggggtgggatgtcacagacggctgtttttacgttgtcggggaaccagtcagcaaagtagctgctgttcttatcttgaatgttgaacatctgttcatccacctccctcatgggcatgcgaccctggaaaatggcagccgccgttaggtagcggccgtgacgggggtcacgggcagccctcatgttcttagcatcaaacatctgctgggtgagctcagccacagtcaaggcccggtactgctggctgccccggctggtcagtggggcaaagccaggcatgaagaaatgcagccggggaaacgggaccatgttcacggccagcttccgcaggtcagcattcagctggcctgggaagcgcaggcacgtggtgaccccactcatggtagcagacaccaggtggttcaggtcaccataggtgggtgtgggcagttttagggtcctggaacatatgtcatatagcgcttcgttatctatgcagaaggtctcatctgcgttttctatgagctggcggactgagagggtggcgttgtagggctccaccatggtgtctgacaccttgggcgagggcaggatgctgaatgtgtttat

SEQ ID NO: 481994 - DNA, 1000 bp, Homo Sapiens; identical to SEQ ID NO: 308687

SEQ ID NO: 481995 - DNA, 1000 bp, Homo Sapiens
aattaataacttggcacttatttaaaaggtttaacagaattggaggcgacacattttgtactgacaacacgtcatgagataacatcttttgtttaaaataacttaatacactagaaaaaaatatgtcaaatataaataattttgttttcatggagaacaaatagttacaaagctcaaccgcataccaaagttcagttagaagagcttttcctctttcttgtaaattagaaggtaaaacaaaaacaaaaacaaaaccccacaaacttaggcttgctagcgaattgggatacagactggcttagtccaaggtatcccagtttaaatagctacatgaattgaaacaaacaaccaaaagaaaaaaaaaaacaaaaaagaaacaaacaaacaaaaaaaaaaaggttacttgaatagatacacctttgtgagataaaatgcaaatgttgaaagtcagtccacacattatagtcaaaataaactttgttcgtgtgtatcaacatatcttacacaaacctagtgcctgtatctagctgggtgttatttaaggtgaatttgacgggatagagagggggaaataaaccactgtcttcaaataggacttcaggaaaccaacaagaaggaacacaagaaaaggggaatggtgggaactaatactgattgagcgcctactgtgtctggcacagcgaggcgctgtaccttcattatttcatttggtggtcttgttttctttttcctttccccacatattctgcccacctctgtcttcttagggcaatgagtgtaattttttccctttctgacttttttcttttgttccccaggatcaaagacagggcaaatatatatatatatatatatatatatatatatatatatatatatatatatggcaaatatatgatatatatatgtggatatatatatatcaatttccagatacttttggtattgtttttcatagtgaagatgaaaatggagtgagtgcatgggagataagggggtg

SEQ ID NO: 481996 - DNA, 235 bp, Homo Sapiens
cgaaattgaatggggtcatgtaagtctgttgacagaagtaagaagcaaaatcttctggttgcagattgctgatggtgagaatgaaatctgtcccagatccactgccaatgaaccttgaggggaccccactttgcaatttggacgcagcatagatcaggacctcaggggttttccctggtttttgctgataccaatttaaagaggtgctaatgctctgacttgcccggcaagtgat

SEQ ID NO: 481997 - DNA, 1000 bp, Homo Sapiens; identical to SEQ ID NO: 308691

SEQ ID NO: 481998 - DNA, 1000 bp, Homo Sapiens; identical to SEQ ID NO: 308692

SEQ ID NO: 481999 - DNA, 1000 bp, Homo Sapiens; identical to SEQ ID NO: 308693

SEQ ID NO: 482000 - DNA, 1000 bp, Homo Sapiens
ggatccaccaggtccagttgcctggctgatggttccgtcacatcagtgctttggtctccaccctagccccacctgcccctctcaccctttgctctaagtgatctctcatgtgtgtattgggtgggggtgggggcatcacacccatgtggtgaactgtggggcgggctgtggtgagaagcctgccctaaaatagcccctgttcactgggccctgcctgagacctttgccccgggacccctccctgggatgaaaccactgtgtctaaaacgccccaggatgctacagggctagttagagccagggcagaaaatagaggtggaggactggaagccatccagggcccagcgggagggatttcaggaactggtgaaaagagagatggggctgatacaaaaacaagggtgaggccgggcacagtggttcacacctgctatcccaggactttggtaggccgaggcaggatgattgcttgagcccaggagcttgagaccagcctgagcaacataggacaccccgtctctataaaaaaaaatctttttttaattagccagtcctgatggcacccacctgtagtcccagctactcgggaggctgaggtgggaggattgcttaagcctgggagttcgaggctgcaggagctgtgattgcaccgctgcactccagcctgggagacagagtaagaccctgtctctattttaaaaagaaaacagaaaaaccaagggtgagaataaagccttctcacaggaagacacacatacacacctcaaatggcgcaccatgctgatacccagatccacacagcccttcagaccccttctcagttggcacattacctcagctgcctcatgcacaggctccaggctcctctgcacagattcctagcacaaacatcttctagtgtacacacaccccatatacacacacctccagccctcatccgtctgcacatagatgtgcatgcacatgaacacacacacacacacacacacacacacatcct

SEQ ID NO: 482001 - DNA, 1000 bp, Homo Sapiens
aaaaataaaaaataaattaaaattaaaattaaaaaaaaaaacaggcaaggagaagaggccggagaggtttgacttttcacaaatcattaattaaacaactatctactactgagtgtttacaccaggtgctggacatctttaggtcagcgtgtacggcagtaacatcttcaacgcgtagctgcagacagactgaatgcaaatggaagaacacagtggcacgggagggagcgcgctgatgggaaactcaggggagaaaacagttcaagcaggccgggcacggtggctcacgcctgtaatcccagcactttgggacgccaaggcgggcagatcgcctaaggtcaggagtttgagaccagcctgcccaacatggagaaaccccatctctactgaaagtacaaaaactagctgggcgtggtggtgcccgcctgtaatcccagctactgggggccgaggcaggagaattgcttgaacccaggaggcagaggggtgcagtgcgttgagattgcgccactgccctccagcctgggcaacagagcgagagtccatttcaaaaaaaaataagtaaataaaaaagaaaataggtcgagcaggctgccgctgatgagctccatgaccttgggtatgttatttaacttgttcacaagtctgagtccatggggtatataataatactacctttggccgggcgtggtgtctcacacctgtaatcccagcactttgggaggccgaggtgggcagatcacctgaattcaggagtttgagaccagcctggccaacatggtgaaacgccgtctttactaaaaatacaaaagtagcggggcagagcagtgcacgcctataatcccagctacttgggaggctgaggcaggagaatcacttgaactcaggaggcagaggctgcagtgaggcgaggtcgcaccattgcactccagcctgagccacaagagtgaaactccgtctcaaaaaaataaataagaatagtaccttcacctcacaggac

SEQ ID NO: 482002 - DNA, 1000 bp, Homo Sapiens; identical to SEQ ID NO: 308697

SEQ ID NO: 482003 - DNA, 1000 bp, Homo Sapiens; identical to SEQ ID NO: 308698

SEQ ID NO: 482004 - DNA, 1000 bp, Homo Sapiens; identical to SEQ ID NO: 308699

SEQ ID NO: 482005 - DNA, 802 bp, Homo Sapiens
catggccacaagcggaggggaggtgcgtgatggtcgcgaaacaggcgcgctttctcagactccccgcgactagggaggaagggtcccgcgcgggttgcccttttaagccgcagcttcctgcttgcccggctgtcccctcccctcgggcgctcgccacctaacggggaggacggacttcggggacagggcgccgcccagggcgccgggcctccgcctccgccgcggcctccccgggcctcgctggcggcagcgcgcgccggcggggcgtcgggggcgcgcaggcgcgggcgggctcggcgcgacgctcgcgcgccagtggggaagggaggggaggggagaggaagggcggggaggagagtggaggggaacggacgggaggggcagggaggggaaggtcggggcgggtcggggcgggtcggggcgggcccacgggcggccggatttgcccggaggccgcacccgggggctctcaggtatgtgcgccgcgggggtccctcaggggggttgggggtagcccagggaggtcggggtcgggggctggcctctgtagggcgctcagaggccgagtccccccgagcgccgcgtgggtgaggcttggcggtctggtcggggaccgggtcatgtgagtcacgggcgcccctcctttgcgcccgcgcgccctcggacgggcggcccaccctggcctgtcctctggcggcctcagcggccgggctgcaggggctgacacgtgggcaggaaagcgaggcagagcgccgccgcgtaaggccgggctgagggctcggcgtcaccagccaggctgcag

SEQ ID NO: 482006 - DNA, 1000 bp, Homo Sapiens
agatctgcaaaccttgttagttcaatacaaaccatgatctagcagacaacttatattcaaaagctcatctttcaaaaggttccaccttgcccgtctatttaaacagtcacgaccttccttagagaggcaagcagtaatcttacatgacacataaaagctgtttcactgtgacacatatataatgaaaagtaatcagtctccaaagtttttccaatccacaagcatgcatacacacacacacatacacacaccgctttggtactcttgtctctaataatttttaaagcctacttttctaactgaattttaaaagtaccttgaatttaaattttttttaaacttcagtcttcaatattgaaactgctaagttaccccatttttccatgaaaaaaaaatagaaaaataaacttggggaaaaaattaaaaataaaaaataaacttgggaaaacattactaaataggtttaagaaaaaagcctatataggccaggtgcagtggctcacacctgtaatcccagcactttgggaggctgagccagacggatcacttgaggtcaggagttcgagaccaccctggccaacatggtgaaaccctgtctctgctaaaaatacaaaaagtagccaggcatggtagcatgcacctgtaatcccagctattcaggaggctgaggtgggacaatcacttgaacccgggaagtggaggttgcagtgagctccggtcgcgccactgcactccagcctgggcaacagagcaagactctgtctccaaaaaaaaagaaaaaaaaaaaacgcctatataaagaaaatattccaataggagataaacctatgtacacagagttgctcaccccagcattatctgtagtaacaattagaaacaaatgaaatattcaaaaacagtaaattaggcagatgatgaaacaacatggcaaatgtatgatgctaagccaaatatacaaaaagatccctgtgagacggagcagggacccctctttggggtg

SEQ ID NO: 482007 - DNA, 1000 bp, Homo Sapiens; identical to SEQ ID NO: 308701

SEQ ID NO: 482008 - DNA, 1000 bp, Homo Sapiens; identical to SEQ ID NO: 308702

SEQ ID NO: 482009 - DNA, 1000 bp, Homo Sapiens
aaccccaagcccagtcccaactctggctgcggttgatttctggagtcatctccatggtgtcctggccagaagccagggtaaaattgaagattttctggggcctcgagctttgtgggttgcctcctccctggtgagttggtgcccctgtttgtctctggtggtgccgatggacagaagagcacagacagagagctgctgtacaaggtctttttctttgttgtcatggttgattttgtacatttcagcatttgcatcatacaaaggggggagcaacagccatggcttttggtcaggttcaggggggctgagggggtgctcctcccctccccccaggcactgacacattgaaaggaagcagagcaacaatgacacagcacggatgtgggaaaggggatcccccacgggggcaggatggtccatctcaccggggtctcaccaggactccccgctcccacccagggccagcacgagcacctcccgttttctccccagtgcagagcgtggggtgacaggagtgggactggagcaggggacatttggtgggaggcatgtcctcaggcctgggagaccaggctggccccagcctccctgtgcggtcaggggcctgtggaaccctagaggatggagcaggtggacagcaggggtgggcaaccctgccagctgggtactagggctattggggctggagggtctaccccactgtactctagccacaaggctgtggggtggctgctttgcccaccagctgtccccctgataggggatctgggctgcaatacttctgtatcctccctgttctctctctctctcttacacacacctgggatggtgtctcgacttcctgattccatctggaggagtaccctgcacagctttgcagttaaggacaccttctgggagcttctggatttggaggggaggacgtccatgtttggagatcctgacctgtcactggtgcccagcccagggcgatccacagccgcctttttgcttctctctg

SEQ ID NO: 482010 - DNA, 1000 bp, Homo Sapiens
gcagatgaggaaaccaaggattagataatacagtttgatggggtttaagacatgttagcccaaaaatatggcaccttgacattggagactatagcagaagcaggaaggtcattctcaccttcccctcaaatttggtcctaaaatccaggaaggatttttctgaccttcccttgaagtgggtcataagaccctcattctagagtggcttccatattcccagaagaaagcaaaatcctatctctgaagaaacaggatacagaggagaatctgaaccaactggccctgctaagttctccccagtttatttccattagatcacactccatttttccaatcacactccatgctgcctcttcatcaaacctagcatataaactcaacttgacatgactaccagaaatagctggaaagagaaagaaagaatacgacaattacaattgcaagtaatatgacaatatgaggtcttcaatgaacagacaggatagtctcaaactcctcagtaagttttatattttattactttcatgaacatgaatgaacaacacataacacagcacagtgccttgcacaaacattcaagaggtgcctagacagactaacaggacctttcaatgcattcaattccaacatttgttaattgcccctaagcatagtaactgaaaggaatagtaagataataaatgagttctcaccacagagagcttgcaatgcattcactcactcactctacacatatttatttacatccttacatgttgaaggtaatgggaaccaaacatgaatgagtcaagaatcatgcattgaagaaactcacagtatttcagaagaatttaggacacatatacacaagcaattagaatagaaaatagaaaaagtatttcctaagaacacagaggaaacagtgtttgagagattaaagatgggtacatggaaaaattgattatcattcttcagcctgcacagtgagatatacattttgtatacgttatatgcttcaaat

SEQ ID NO: 482011 - DNA, 1000 bp, Homo Sapiens; identical to SEQ ID NO: 308703

SEQ ID NO: 482012 - DNA, 1000 bp, Homo Sapiens
gaattcatatttctacatattaagctgttctgtcggggtgggaacaccccttcgtcagtgcaggggagaatgttggcagggctggccgtgcctgtggggatgaggtatctgtccctgccagcccaggagcagcagctggccctccagtgtggtctctctaggtggtttccccttgccctttccaggctgagctcagaccacattgtggggcaattgccagaagtgattgtctctagtgaatggagcgcctcttctttagagtgttaaggatattaattaggtggcaccaagttcatttagtccttggtttgtagttaaatctgttatgaccccataatcttcttgggattgtgaaatggttaaaaaaaaaacccagacttttcactctctttcaggattttactcagatttgtgtgtttgacaaactagctagtagtttatgctctatagcagacatttttgcttgcctccaacacatctatttcttcctttatcctgacctcggtgtccagatttgctttggaggaacaatctcctgctaggattagcttcgggtattgaccccactcttaattctagggatgggttagattggcttgagctgattagtatgtcctgtttccaggcatgtgacacaatttgagcaaatgagacacaaggtgccaagaaggggatggggtggatgggctgccattctcacaggcaggagctggtagatggcatacaaggaagctgggaggtgggaattagtgcggccctttatttgtatcctgaggatgagggacatcctgaggatgagcctggcacacaaaggaggccagaatagagagaacaagggctggctctgccatgacaaagtgaacttctggaagaagccgtaagtgaggccagtttctctctgggttgcaaagggaagtttgcataatcctatccaccacagaaatggggaaaactaatggccaaagattatttagtctcatcaacaaaggaatgctttctg

SEQ ID NO: 482013 - DNA, 1000 bp, Homo Sapiens
aagcttgagaaatggagactctctgggcatcggctaagggggcccggggccttcccaggcctgctggagtccgggaagccgggggcacccagaaggaaggacccgtcggactctgcctggggacagcctgctccgcgccagaagggtccgctgctcaggcagcatccccgtgcctctcctccagtgggtccctcaggtagaatcggggcaggccccactggacctgcagggaggaggctcggaggatgcatcctttgcaggacctggtctggtacagcagcagacggagccatctcccggggctttctggcttctccgagggtgttcaggagtctcccaagtgcacaggggctcgtgcccaaagggtggaggtcggcaccgcttcgctcaattcaggagtggagaaggaagctagaggaccctctggaggtggcaggtttaatgtcctgcttttttatttatttatttatttatttatttatttattttgtaatcaactgaaagaaggcagaaggagtcgatgggcctcttaggccggaaaccttacaagcataggaccaaggcagaaaaggtccagagggttcatggtcctccgttccacctgaatccagctagagagcgagccagggggataggtgtgcccctcgtcggcccgtgcgctgaggcactgtcacacaaagagacattcaccttccacgtcaacgcacctttaagggcgagagcggtccgccgtgcccaagaggaacgggatgacattcaactgggacttgcctcaccttggcttgggggacctcgagagcggtcccgtgggggcggtgttactcgtggtggtagaagtggagggcgtgtccgggtacttgagttcatgggcatctctcccgccgcctctcagcctatctgcaccatgtctcacacgttcagttgcagctcttaccgttttgaaggcgcacgtgggcaagaagtcctgggcagcacaagaaagtcaatcacgttgagacag

SEQ ID NO: 482014 - DNA, 1000 bp, Homo Sapiens
cagataccagacgccgagcaggatggtgccggtgcggacatggcagcacaagcagcagctgttggagtagaaccgcgtccagggcgcgaccatcttcatcgctccgggcgcagtggcgcgagcgcgcgcgcaagttttcaggagcgtcgaccgcctcgcctggagcccgccgcgccgctgctgccggctcctccgccgctccggctcccggcccgctcgcccgtgcgcccgcgggcctgcctcctcgataccccgagagctccgagcttctgccgggtcggtacccttcgctccgaaggcgaccgctgcagcggcggggacggggagggggcggggcggacttggccatgtgacccgagtccgtgacgtcatcgcgggctccagccagctgctggagctccaagcacccggtgagtaaatccatcagcgtgcaccctccgccagtcccctagtcggccctgagtggaggtccgggccttccttctttcatctggccgttcgtgtaactccattcaagggtcgagattcttttagtctagttccttgcgattttcttcccttctacttcttttttttttttttttgagacagagtctcgctcttgtcgcccaggctggagtgcaatggcgcgatctcggctcactgcaacctccgcctcccgggttcaagcgattctcctgcccaaccaaccgagtagctgggattacaggcgcttgccaccacacccggctaatttgttgtatttttagtagagacggggtttcaccatgttggtcaggctggtctggaactcctgacgtcgaatgatccacccgcctcagcctcccaaagtgctgggattacaggcgtgagccaccgcacccggcccgcttctacttctatcttgcaggtaatcgatacagctcctatcactcttatcttgcacgagaggaaggaaaactgcgcggtgctattccagtcaattgcagtactttgaaccaccaccgagagcaatttgtct

SEQ ID NO: 482015 - DNA, 1000 bp, Homo Sapiens; identical to SEQ ID NO: 308706

SEQ ID NO: 482016 - DNA, 1000 bp, Homo Sapiens; identical to SEQ ID NO: 308707

SEQ ID NO: 482017 - DNA, 1000 bp, Homo Sapiens; identical to SEQ ID NO: 308709

SEQ ID NO: 482018 - DNA, 1000 bp, Homo Sapiens; identical to SEQ ID NO: 308710

SEQ ID NO: 482019 - DNA, 1000 bp, Homo Sapiens
gatcacctgaggtcaggagttcgagaccagcctggccaacatggtgaaacctcgtttttactaaaaaggcaaaaaaaaaaaaaattagctggacgtggtggcacgtgcctgtaatctcagctacttgggaggctgagacaggagaattgcttgaacccaggaggcgcaggttgcagtgagctgagaccgtgccactgcacgctccaccttgggcaacaagagcaaaactccatctcaaaaaaaaaaagaaaaaagaaaaacccaaacccccccccggcccccaaaaaaagcagctcctcccatcacctctgctctggacacagtatttaaagacgtatcctagaattcccacttcctagtcatacacgaggccccagagctggagtctctaactcctttagttctggatgtgaacctagctacgactaaaaccacatcctggaagtccatctaagagctgtacaggggctttctgcccagagacatgctccagaactcagaccgtgcatcagggcagcacaacagtaggtcacttcaaggctaggaatggtggctcacacctgtcatcccaacactttgggaggatcgcttgagcccgggagttctcaagaccagcctgggcaacacagccaagatcctgtctccacaaaaaaatacacaaacgagccaggtgtggtggcgcacacttgtagtcccagctaatcaggaggttgaggccggaggattgcttgaccccagcaggtcaaggccgctgtgagctatgatggtaccactgaactttagcctgagcaacagaccaagaccctgtctctcttaacaacaacacacacacacacacacacacacacacacacacaagcctggccaacatggcaaaaccccatctctactaaaaatacaaaagattagctgggcatggtgatgcgcacctgtaatccccgtgcaggagaatcgcttgaacccaggaggcggaggttgcagtgagccgagatcacaccac

SEQ ID NO: 482020 - DNA, 660 bp, Homo Sapiens
tgatggaaaggaaatgagaggttctaagagatgggctagcggcttgtaacctacatggaagaggttatgaaatgaccacagaatagaatgggcctgtgaggctggaaggagatattttccttggtctaagaaccatttgccttgtgtgggaagggattgataggtggaagtttcagcggaggagtaggtgggagtgaacgatgtgaaggagagaaactggccgtgaaggacagaagttggaaagctagctgcttgtctagccaccttatcagcataagcattgtctagagcaacgggatctgatgccttttgatgccccttgcagtgaatgaccccagcttcttttggaagtaaagcggccttaagcagagtttttattaaagaggcattaatgatggaggacgcttgcgtagtgaggaaacctctttcagcctgtataacagcatggtggtgcagaatatgaaaggcatatttagagtcagtataaatattgacgcgtagtccttttgcaagagcgagggcttgagttaaggcaactaattcggtttgttcagaggtaatggaggggagcggagcggtagcctcagtgatagatgtggaagatactatagcatagcctgcctttgctgatgagtggcgattaggcctgctggaactgcc

SEQ ID NO: 482021 - DNA, 1000 bp, Homo Sapiens; identical to SEQ ID NO: 308711

SEQ ID NO: 482022 - DNA, 1000 bp, Homo Sapiens; identical to SEQ ID NO: 119986

SEQ ID NO: 482023 - DNA, 1000 bp, Homo Sapiens
  misc_feature (883)..(883): n is a, c, g, or t
  misc_feature (974)..(974): n is a, c, g, or t
cttcctggccttctgtgcaccgctaagggcccagcacctcccttcctggccaatcctcaagggatccagctcctttcgaagtatgataagttgccttgcacacctgtgtggtcagtgtccttagcaggagaatttatgtgaatattgccttttcttccatggaagccacccagcctggcccagaaccctcatcacctgctcttctcccccaagaaatatgaagaccattcccagtacagacactgaattgcaaccttactccccttcagaaaataagggaaatgtattaaagtgccctttgatggccactccccgacgtgcagctgtagatgtgaggcagttccctggcgccccactgtgggtgctagctgttttgcagggactgaacaggccagagaccgtgagcatgtcggtttggagtagttggcacttaaatggggtcagccttccactgggcacatttctgcccaccttctttttattttttaaacaatacacttttgttagtgcttattttgtggcaggcaccaggcagtaccagggtgggggcagaaataaatcaaagtccttgtccttgaaaaacaatctcttgctggaaggctggattcagtagactgcttgggcaggcttgggaaggacccaggtgagcacagcatccaccaggctggctggcaggtaggaggcaggcagccagagcagcttggcatcccaacctgggctgtagcgggttcgggggtgtcgagcagtcagggcatgctccaggcatcggctcaccttggttaggtccgggtcacagatcaggttcatgatgcgctgttgcattttcaggtctgcagccccataggtggttgcaatcagtttcccttcctcactccagcccatnttaggtactgttttttggggccctgggcttgtcaccctcagtcccctcctcagtgtggggagtgggcaggttccacatggcctgggcactnttgtaacatcctgttcaccctcaacc

SEQ ID NO: 482024 - DNA, 835 bp, Homo Sapiens
tttttttttttttttttttttttttccattttttccaacttttattttagatgtaggggatacatgtgcaggtctgttacttgcagtttttccaggggcatggtggaagctgctgctgattccaccattctggagtctggaggatggtggccctcttctcacagctctactaggtagtatcccagtggggacataactggcaactgtagacataattgtttggcttgctacaaatccattttctgttcatgtagattctgccactgttgactccattgtcattcaggaaggcacattctccacttcctctgatagcaagcatgttattatattccatgttgtctgtccatttccaaatgcgatgggatgattctcttctaaggccaatccaatggtcagaagggcctttgtatcttttcaggaaattcagttcctccatagttgcaaactgagcaaggctggcttctaatgagacacagaacgtttgactcaatgtctaatttcttatgccttcagaaaaataaaaacatttactcctaaatctaattcagctttttgggcaagcagcgtatttagatgactctaccactggcttttcctttcttgctgacaaaacaatagaaagtgcaatcacacttgtagtcaggactgcaatgatgaacaagcaacaataaaccttgacaggagttactggagatataagtgctagacattgtctttgcagagttttatcaggcatgttcaacatggagggtccatcttcttttcttgtcatcacatgtacagtaaaggaacaggcaacaaggcacaggccaggtagagaacccatctgcat

SEQ ID NO: 482025 - DNA, 1000 bp, Homo Sapiens
cagctgcagaagttgggaaagatccatcatcttgaaaactttttccccacaaacccactgtgatctctcaagcaattggtaaggaatccaagagagtctgtatatgatacagatcagggagagcagaacacttgggaggcaaccaagtcttgggggctgagcccttaggaatgggattagtgcctttataaaagaagctcaatggagttcttttgtgccttccactatgtgaggacattgaatgaagacaccatctatgaaccatgaaatgggctctcatcaacactgaatttgtgagcatcttgacctgagatcttacagcctcaagaagtgtgaaaaaagaaatatctgttgttttttagtcacccagttcatgttattttgttataagagtccaaatagaccaagatattccacttaatatgtaggggaaggcaacaaaaactgccacacttagaatactcctgatgctgggagtatgaaaacaggaaaaacaaaacaaaactgctcttgaaggtgaaggaggaatatcactgatctcaccaaaacaggcaggaaaagaacagaagtgtgagaaggctacatgcctgagaccctgagaaaaagtacctgcataagtctgagatgaaattacctaccctagttataattgaaatcccaaaaagaaaagagggaaaaataatagagcaaaagaaatatttttcaaaataactgccaaaaatattctaaaagaagtgacagaaaatcaaacttcagatataggaaactcagagaacgtcaaatagaacaaaaataaataagaattacatcttgaaaaatctttaaaaaatcaaccttccaaaccttccttaaattttatatcttgctccaaatacatagagatataaataggttatcatcaagatatggagaaagccatatcatggaaacactaaaataaagctgtggaaggactacattgatattagacacaacagagttcagaacaagaaatagtatc

SEQ ID NO: 482026 - DNA, 1000 bp, Homo Sapiens; identical to SEQ ID NO: 308714

SEQ ID NO: 482027 - DNA, 1000 bp, Homo Sapiens; identical to SEQ ID NO: 119988

SEQ ID NO: 482028 - DNA, 1000 bp, Homo Sapiens; identical to SEQ ID NO: 308716

SEQ ID NO: 482029 - DNA, 1000 bp, Homo Sapiens; identical to SEQ ID NO: 308717

SEQ ID NO: 482030 - DNA, 1000 bp, Homo Sapiens
caagtacctgtggtgctgtttcacattttctttttattttcatttaaccctcagagcaaccgacaaagtagttgttattattacacctattttacagatgaggaaaaatagatcagagagattagataatttgcccatgttcatacaggtaataagtgacagtttcagaatttgaacccagatgtgtcagattctaaaggccttattctttagttctctactttacagtttcccattgtcctttgaagaacacatttgggcttgctctcagactcgccaacataaatcatcatttacatatcagggcatgtgtgagttccagcagttcactgaaataaaatccctgagccttaaccctcccatctcaaatacagtgaaaatttattttaatgataatgatggtaattttttatttgacactttttataatgctgatgttaaagtcaagaagcatttctctgtaatggaaaaaatgtctcatttttcttcctactgggcggtcagaagttggattttagaaaaaatatattgaatagggattataccgccttccttccttaaacctcataaagcaatggagtaggtggataagaagaaatagaaccaatttctggaaacaactttggagtaatgatcatagaagttacagatatccaagaatgcctaaagaaatatatctgtccttccatacccacgacacacaaataggatttatagttaggagagaaaggatagagtcagtcaaacgtccaaggttcttgtgattggtgccatgatagaaggattgagctttacgagcaggcttatgttctcctgagtttgtgggtgaagctctgagtcactggagatttaaggtcaaatattcatgctctcagaattattttcataaggaggtattcttgattacacagaattgggaggtgaggaaatttcctagaaaataaaacaacattaatgtccaagaacaggatcattatctccttctcctcccatcccttcc

SEQ ID NO: 482031 - DNA, 1000 bp, Homo Sapiens
tttttttttaagttgaaactgaagtttatttgcattcaggcaagtactctactgtttccattttgctggccttaaaaacattcgggacatagcgtaagtataatagcataaaaatcatactactataatgatgatcctaatgccacaaaacaggctagattttgcctgaaaatttagacaaaacatgataacccatactttacacaaccaatgggttagccatgcagctgtagttattcatcatccaaagtactgcctcatgcattttgctaaattgtctaaatcctggtacagtattgattttcccctctatgaactcacacccacccaaaaagccacaagagccccttgccctggctgagttctctctgaagtaggatccaggcatgttcttcctgacaggggtcctacagaagaaactgatcactcgctggtgggaagcaaaccactggctcgggggtctccgactgagaggaggaagatgctgagctggctccgtcctcagcagtgccctgtgacaggagaccccgcccaggggggagcttcatgcccagctgctcagccatctccacgtgatctccggggtggacatagtcaaagacactgctgcctgtcagctccacttgtgagaggcctaggtagatggagactgtttcggaaatgtacaaaaattttccttcctgatttagtgcaaatacaaagccatccagggactgcaaaatgtggcttcccaaatgtgcttcaaatacttcaatggctagtgcactggggcttctccttcgctgtgcaccttttactgatgtgttaggtggagggccttccattcgcaagttccacggagggtccccctggttagcaaagtccctcattttcagatagctaattgtaagtcgaatgatggatgccttgtcgagctggctggtaatggctgcaggaagaggcaacaacttggccaattcatagaactcaaagttttcttttccccggcgggagcgagcag

SEQ ID NO: 482032 - DNA, 1000 bp, Homo Sapiens
tttgagacagagttttgctctcgtcacccaggctggagtgcagtggcacgatcttggctcactgcaacctccgcctcccgggctcaagtgactctcctgcctcagcctcccaagttgctgggattacaggcacacgccaccacccccagctaatctttttgtatttttagtagagacgggtttcaccatgttggccaggctggtctcgaactcctgacctcaggtgatccacccacctcagcctcccaaagtgctgggattacaggcgtgatcataatcctaatgttgttatttttatcattgtctgggcaaaggccccagacatttgacttacagaaaacagcatgttcttcttgtcctggttcacagctctggggtctgggatggcctctgtgtgcttggtcacggacacagattcacctggtcagggaatcagagatgagaagccccacatgaagacacgcccatcccttagtcctggcccactaggtcccggcctcctggggggggcctcacccgtcaggatggactggtccactcgcagcgtggtggacttgatctcgatgaggcggaggtcagcaggcactttgtcccccactgtgcggggagaatggcttggctgagggtggctttgggcaccaccagctgggaaaagccagaagggttcccagaacccaaggctggggctgggcgtcgggtgcctgagctgtgatcgctctggtgacccctgcccctctggcccacagtctcatctgtccaacagggttttggccaaagggctttggagggatccgacagccaccccctctgtatatacggccggaatgacggaggcacagagagggatggggctcccaggcccacataataaaaggaggaggcccctacagaagcctgagacaggaggattgcttgaacccgggaggcaggaggttgcagtgagccgagattgcgccactgcactccagtctgggcaacagagcacgactccatctcaaaa

SEQ ID NO: 482033 - DNA, 1000 bp, Homo Sapiens
gaattccctgcctggatctcacaagcactttccctcttggtgcctcagtttcctgacctatgaaacagagaaaataaaagcacttatttattgttgttggaggctgcaaaatgttagtagatatgaggcatttgcagctgtgccatattaattggtgtcattgtttttgttgttttcgtattattattttttttttttaagacagagtctcaggccaggcacggtggctcacgcctgtaatcccaacactttgggaggccgaggcgggcggatcacaaggtcaagagatcgagaccatcctgatcaacatggtgaaaccctgtctctactaaaaatacaaaaaattagctgggcctggtggcgtgtgcctgtagtcccagctactcaggagctgaggcaggaaaatcacttgaacctgggaggtggaggttgcagtgagctgagatcacaccactgcactccagcctggcgacagagcgagactctgtctcaaaaaaaaaaaaaaaaaaagacagagtctcactctgtcacccaggctgcagttcagtgacatgatctcagctcgttgcagcctccgcctcccgggttcaagcacttctcttgcctcagcctcccgagtagctggggttacagacatgcaccaccatacccggctaatttttgcatttttcatagagacaggattttgccatgttggccaggctggtctcaaactcctgacctcaggtgatctgcctgcctcagcctcccaaagtgctgggattacaagcatgagccaccatacccggcctattttattacattttaatttattttattttattatatcatccaccatgtctggcctattttattatattttaagatattttaatatattacgtgtgttgtaattggattatcatcggtgagctttgtgagtgagtgtcttggagatgactcctcctgaccagcccaggaccagctttcttgtcaccttgaggtcccctcgccccatcac

SEQ ID NO: 482034 - DNA, 1000 bp, Homo Sapiens; identical to SEQ ID NO: 308718

SEQ ID NO: 482035 - DNA, 1000 bp, Homo Sapiens; identical to SEQ ID NO: 308719

SEQ ID NO: 482036 - DNA, 1000 bp, Homo Sapiens; identical to SEQ ID NO: 308720

SEQ ID NO: 482037 - DNA, 1000 bp, Homo Sapiens
agatccaccctccactccttcctggctcttccaactgctcagaaaggaacaacccacacacagggctctgtgtatgatatatatttatatatataattgctctcattttattttacttaatcctctttttacagtagatctgacacaggcattaaataactgcagagagagaccatggtagggcgggtgcaggaaaacatgggggcccgaagggaagaaacacagatccagctagagaaaaaggtaagggtcacctgtgggtggagtgtggaggctgcagcattaaaaaaagaaaaaggaggttagagaggatgaggacgtgaagggatgctggaggacaaagggttaaaatgcctctacagctacagaatattcagagcaggaggcaggaggcccctcatttgacattctatgggcattatgggtttttttgtttttgtttttgttttttttttaaaggcaaaggggtctgaagagatggagccaagacattcagaggctagatttggaattttcaggctggcatgcagaggaaaaggaaggagttagtgattagttgataacttgctaaaagaagccagagaaaggatggtgggggcagatctgggctcaggggaaggaggtggaatagtcccaaagccagccgatgtttccaaggtggccactggggacggagccagaatggccgcccctcccccagagctccctgggaagtggaacttgaaggatattctgggaaggcgaatgggggaagggagccatccataaaaacaaagtggatattcagcctaggtcaaccccgcccctctgggtagcagctatttgggtgacagaacggcctaggaagaaactgaaggccgggcgcggtggctcacgcctgtaatcccaacactttgggaggccgaggcaggtggatcacctgaggtcgggagttcgagaccagcctgaccaacaaggagaaacccccatctctactaaaaaatgcaaaaaaaaaaaaaaa

SEQ ID NO: 482038 - DNA, 1000 bp, Homo Sapiens
ggatccttctgcaaaggctggcttccttcaggacaagaatgctagggagctcagaagctactgggcccttcctgatcccaccccaatggtcaccagcaacacaatgcaagaggtgtcaaagcactatgttataaagccaccagtgtagaaccagatcaatgaaaaagcctctccaacttactgtgtttattcagagccaggccctgtaatgaatctatttatatggataactgtagatgaagtatatacttaaatcaacatttaaaataaatgtaaaagtaactcttgcagatgaaaggtgcaagggcgaggcctcctctccaggatgtgctggtcacagtgacctctgggtcagaggggcttctggctcactggcctcatgggggcccaagggaggcatttacaggcccgccggctgcggaggggaggcaggggtggcaccaacttgcttccctgtgggctgtgggccatggggccaccgggcggagggcagggaaggaagcagacacacagggaggctggggagccctgtgcacagcccgcccccaacctcaacttccccaaggaagaagtgtgtcagaaaaggcactgggctatatggtcagctgtccgtttccactgggtgcctggatggaggttgcctgtgtcaaagatccttcaccgaggtagaaaaccaggagcacctccctgcagggaccctttaccactgaccacaaccaccacttctatcccccaaccccccacagaaaactgagtgactaagaccacccacccccagcagggtgaggcccagactcaaatctcctcagctcatggcatcctagggggtgctacacttccctcaccccaaagaccctgttaaagcaagtcagggtggagaggaaaaggaagcagacgctccccactctccctgccgtgtcccctgctctgactttgcagggacagcatgtggggtgctggccttggcgctactggggtggattttccttcatcatttcac

SEQ ID NO: 482039 - DNA, 1000 bp, Homo Sapiens; identical to SEQ ID NO: 308722

SEQ ID NO: 482040 - DNA, 1000 bp, Homo Sapiens
gaatagagaggaggtctcactatgtcgcccagactggtctcacattcctggcgtcaagtgatcctctcacctcagcctcccaaagtgctgggatcacaagtgtgagccaccacactgggccctaattttatttttaatttttgtagagttgagatcttgctatgttgcccaggctggtcctgagctcctggactcaagcaatcctcccacctcagcctcccaaattgctgggattacaggtgtaaaccactgcactgaaatagctgacatgtataatctgaaagacttcacataaaaattacatttcaactcaaatatagtatatttgaatgtttttcctctaaaagccattttctagcttatcttggaagatcacaaggtatagcaacacagggcctacctaccccatatgtaaagggctgatgccctccctcttcctcactctttggacagagcaggagactcctgacgagacacagtccccatcaggcccagtgcactcttttcatctgtctggcatttgcatctaccatcttgatttaaacagaggaacaagaggagctagccttttcctccttcaggtagcaacttacatgccacttcctcagagactttttcttacctcctgtccttgattacattttcttctaactcagtcccttatttcatagttgtaagtggatataaaattgctgtttttacaggtcggggatggttaaatatcagtaactgcacatgattcaacctagtaatacaatttgtattaattattctgttttccagtgtttgtgttttcctactggaagtcagttcattagggcagggacttggctactatgatattctgaatgactagtacacagcgcctgtcaagcgctaacatatttggatgaataaatggaaggactcctcccaccagaagtccttagcagctccagaacgtacacaaagtacatcttaacctctcctgaggagagcagcgcaagatataaacagactt

SEQ ID NO: 482041 - DNA, 1000 bp, Homo Sapiens
aaatttcaggtgtggctttaaagtttaaaggtacccgtattgctctgtgattctgtgctgggaagccgagctcaccacacctcttttgggttacagggcatactcactcccatactctgagccacagggagagctgtgcaggcagccactgctgaaacaggaggcagtattaattttgaaaacgatccatgctgtaatgtcatgaaccaggaagctggaatcctttaccagctctttatgcaaatatttggctgcagcttgagctgaaggacttggaaggagtgggtattaaaaaatctgcctcattgtagagctttccttaactccattcctcccccggattggcctgtttgtctgcctccaccccatgttatctccctgaggtgtgtttacaatatcctacttgatattatctttctagtcatgggttcactttctactttgctccaagaatacaaagaaaggcaactctctcttagatttcaaacagcacaaaaattcacagtctacaatttataaaaacacatcaaggctgtttaaaaaattaatgatttaaaaaaagaaaggtaaatgatatcttttgataacgactaactcaagtttccttttaccccaaaggcaagtgtgtgtgtgtctgtgtgtgtgcgtgcatgcgcatgtttgcaaattgatctggctgaaataagttttttaaaatcgagtgttccaatccggcatacacacagtttcttccggcactgcttgaagaatatttgaattctttactgaatgtctgtctcaacctataacttccattcgtgattgccttcttaaaattttaaattgtggatactacactgactttataacaaattaagatagatttcttgccactttgtagtatttgatataattaaccctctccttggcttaaagtttcccagaggcatccttcaacaaatgaacaaactggggatcatctctgttataccagaaaggtctacactaagaagcaggcaac

SEQ ID NO: 482042 - DNA, 1000 bp, Homo Sapiens; identical to SEQ ID NO: 308723

SEQ ID NO: 482043 - DNA, 1000 bp, Homo Sapiens
acaatttatttaactctttctttcacaggaaatataagtatgtaatgtaaacaccgacacgtgaaataaagtacaaggatcaggaagacaagtgaattggacaatactcttgctttaacactttactgcttcctgatttcatttgcagcatgaatcacctggttatacagactggcagaaggcaacattcagatttacagatacaccagaaagcctctgaaatccaacgatgccatacggaagtctgatctttctgttgcaaaaaaaattaaagctgggcacatgtccatttatccatttacccaaggcatttaatgtaggagcataagaatgcactgattaacacgtgagctttaatatgcttgtggaggccaagattaaattgtacctcttctccctcttcagagaaaataaaattaaccaaattaaaagcagagctgcctgatactagccagaagactacataatcacagtgaattcttatttcaataaatcccaggaaatgcaaaacacaataaatgattgccactggagctttgcccaaatggtcaccgtagacctcatgctgcagaatcatatcaggttttcaaggttctttcctagaactccaaagttggaaaaatgacccagataaatgattgggataaagacccatcatgatttaaaacaaagggtctatttccaaacttgaattcggtaataaagagtatgggctgcaattttctgtgattatctcaaaaaattaaaataacctgtcttctttcttatcagatgacacctaccaggtaggaggtaaattttggtagcagatgcctaccgtgcagactggttcagtaatggtactcagcatcacaagatttggggattcagataaggctgctttagagctagaaatcagagaaccatgcatttgccaagtatacctactccctcactcaccccatgatcaaaggctattaaaaattatctgggccgggtgcggtggctcatgcctgtaatc

SEQ ID NO: 482044 - DNA, 1000 bp, Homo Sapiens
tctagaaaagcaatgtggtgttagcccaacacaatacataccatctaagaattatgtaaccattttcatattaatcactgcagaattatctaattaatattttatttaagaccactgaggaggacgtttcacatgacaagaaatacatcttaaatccatcttagccttgctttaaaatgcaaccgtatctattgtgtaccgctttatgatgaatgggacaaaacccaaacacttttcttctgcaattcatgaaggaaagattacaaaatagtggaaaacatcatttcggtttttttttctatgcacagagaatgaatgataagccttaagctatcaaaatggtggagatgaggagaagagattgacaatcaatgcatacaacataagatactactgtagtaatgtggtaaagctattagatatgtgaaaggggtgattctcctctacattctcttatgctgagtaacagctccccagaataaaagggaaaattttccccagtcaaaatacataaatggaagacataaatatttcctctctcctagaagaccggcagaaacagatgcttccaggtgctaggcattttccattttgccaggggtaatcttagcatgctcacattcaatagttctttgaggaatatccaaataaaattattttagctattctcatgaagatataatacccacaatctaaaagttagtaagaattaaggataaatattaacaagtgctaggattaaaataaaccttcatagggataaaagactacatattgggtataatgtacactgctccagtgacaggtgcaccaaaatctcagaaatcaccactaaagaacttatccatgtaacaaaaaaccacctgtaccctcaaaactattgaaaaataaataaataaactttcatggttacaaaaaaacaaacaaacagctaacacaattaaggagctcacattactaaaatgctgaatcaaggctcagccatgttgtagtatgtatc

SEQ ID NO: 482045 - DNA, 1000 bp, Homo Sapiens; identical to SEQ ID NO: 119989

SEQ ID NO: 482046 - DNA, 1000 bp, Homo Sapiens; identical to SEQ ID NO: 308727

SEQ ID NO: 482047 - DNA, 1000 bp, Homo Sapiens; identical to SEQ ID NO: 308728

SEQ ID NO: 482048 - DNA, 861 bp, Homo Sapiens
gttttcccgctgtccccagatgttcaggactcctggggaccacagcttttattttccaccctctgatcctcactttctaaatctactgtctctcaggaagacaaacaggaagctgggtaagatcacatcaccagaaaggctagtgaaaggagtcagagcctgagatcggcctgaccttgcaggaatttcagggaggtgttgggggatggtctggggttgacagggagaaggactcctccactcatgacatggttgagcgatgggatgcttttaataaaattcaattcattctaatggaaagcgactttgttatgcctccctacgtagggcaggggtgggcaggcagtaccgcctagttcctggaaccaccatgccctctgacctccaggatctgctcttttggtctgcggatgctctcattcatgggaatttcctttgtttttgggagttggagatgaacgatagttgtttatttcatacctatgataggcacatttccaacagctttataaaactccttcatttaactttcctaccctgcagtagatcatgtgacctccagtttacagataggggaaaatagaggcactgcgagattaagaaactagcccaaggtcacacagctggtaaatggtggagctgagattcgaatccaggcagttttcctccacactccacccagttaaccaaagagggtctaataacatcaagggcaaaatagaaagatttatagtaactttagttagactatcccaacccaaattggaacaacccatgtggccaccagcaggtgaatgaaaacaaatatcatggcatattcagagggtggaattctatacagtaatgaaaaagcaaagtact

SEQ ID NO: 482049 - DNA, 1000 bp, Homo Sapiens; identical to SEQ ID NO: 308730

SEQ ID NO: 482050 - DNA, 1000 bp, Homo Sapiens
gaattccgtcacaaaatatttttattatgtgtaagaaagcatacagccaataaaattaagaaaacattcacaatacataaataacacagacctgatgcaggagatatttttcagatttttttttcttttcacggattgcatctaaatgttaagttcattgcttatcaagaagaatacgttgtaaacatttcaaagaaactctgttgaaatgccccacgagttggcatctggcaagggaggcttatgatactttttacagtccgggtgatgatgcaggaacctgattccaaagcacagagaaaggactagcatttgtcaaaagagatgctgatggctttgggggagctcaacacacccaaagggaaggattcttctgtttctcccatcaacagaagtatctgactcaagaatgataatgaggcactattcgttagttagtataccattaacatttaaagactcctttaaaaatcagctctaaattcagattaaagcactataaaaagtagccccactgactggtttggtttgacctggtaagatggaaatgcagggtttgagtttggtccctcagtggggctgctgtaacccactgtctgtgctacagatctctctccaggaaagccatttgtgtggttcagaaaaactacctgacacatgaaatgagaaaagatggagagggccaattattttacataaatacaaagcagcatatacttttcattaccacctaagatcgtaaatttaatgctgggctcttcttaagttggcttttatttaagatatttacagaactgcaaattcccctgggaaagtcatttgtcatttaaaacgttttgaacacagtagtagctatacttttttaaatttttcaaaatcttttcagaaaaagaaagcatttatagcatttgtcaattctcaccttgcatttatctgtgtccatgaattttaaggaatcatttcaactttattcccttatctatcagtttctgctgtgttt

SEQ ID NO: 482051 - DNA, 1000 bp, Homo Sapiens
agtaaacatcagctttcctcaggtgttcttctgctttattattcccgtgtagccacagcaacagaactggccccatgtctctcaatcagggaggtccccagccagctttggaaagacacccatcaaaaagagtgagcaagcctaaagaagggttcaatagggaaggtaccagcggccggctgcagaggggctccattcccctgaccctcagtcacttcccagaaaccacacagaggagcccgggtgtgccagaaacagcctttcataatacaagatggacaggaaagaggccaagggcaggcagttcccaatctccacaagggcaagaaggtagagtccatacttctttcttgtctttttctttttttgaaacaggatctggctccgtcatccaggctggagcacagtggcactatctcggctcactgcaacctccacctcctgggctcaagccatcttcccacctcaaccccctgagtagctgaggctacagatgcacaccaccatgcccagctaatttttgtattttttgtagagatgggatttcgccatgctgcccaagctggttttgaactcctgagctcaagcagtcagcccacctcagcctcccaaagtgctgggattacaggcatgagccactgtaccaggccgagtccacacttctaagcttgccgttgctctcagacttgcagaacaacctattaaacagaagtaggtaaaagttgagaaagggaagtggccaccacagaaccagttctgctgagaacgaggactcgagtcaggctatgctaccctccttccatggccatgggaaaaaggggtgtgtgctgttggtgtgagagatctggatcttaacagatcagacttaaactaatttgcccatgatgaccgtgtggatttggagggacctgggaatctcacagacctatgggatgtcccagcgatatgtcctgggcttcataccagccctgccctgcctgacaagttggatgaaaactga

SEQ ID NO: 482052 - DNA, 1000 bp, Homo Sapiens; identical to SEQ ID NO: 119990

SEQ ID NO: 482053 - DNA, 1000 bp, Homo Sapiens
gctattgctgaacatcccatccaagggaagcattcatttaaacacggtccatttccatggatccatgagtgactggaacacatatccacaattttgctgatgcttttataattgtgaaaatggataatagagagatgtatctattgaaatatttatactttattcaaggatatattcattttgaggctcatgagcaagagttggtaaaaattacagttcagtctatagtcttgagaaatttgctaatctcccagatcttaagcaaaaagaaaaaacaagcaaaccttttgcctggccctaaacacatctaaagctgcttggacaatcatcctagctgttgttctcatatgacttatagcagataagcagattaggtatataaaccataccactttttcaaaaatttccaatcatttagaaatagttactcatggaaataaattttgacttacaaatttcttggtgggtgggaaagcaaaattaagagaaggaaggtgtgtgttggagcagacggaatatagatttactcatatgggccctgcaacagaaagtgaagaaaaatggaaaagtcttagatatgtgagagtaatttatcttcttccatattttctgactcaagttggctagtgttgggtcaccaacactgtagaggcaccctctttcacatttcttgcctaatgagcatatggctcatatttaatctggaacctacctagttgaataaagaatccagcaggaggccgggcacagtggcttacacctgtaatcctagcactttgggaggctgaggcaggcagatcacttgaggtcaggagttcgagaccagcctgaccagcatagtgaaaccctgtctctactaaaaatacaaaaattagccaggtgtggtggtgtgcacctgtaatcccagctactagggaggttgaggcaggagaatcacttgaatccaggaggcggagcttgccatgagccgagattgtgccaatgcactccagcatgggca

SEQ ID NO: 482054 - DNA, 1000 bp, Homo Sapiens; identical to SEQ ID NO: 119991

SEQ ID NO: 482055 - DNA, 1000 bp, Homo Sapiens
aagtgtgatacagtctagtgtttattttatgttatggaaggtacacttgaatttcaaaaatttaaaacatatataaaaagtggttagggactaacatttgtatcaacagttgataaatgtctaagattgtttattatacagcagggtacaatggtagtgctaatgccaacagggcaccatggaagttagtctaaaaattatcgctaggctttatacaagcaacaacatatgctgctgctcttagaattttgggaaatgatctgcttctaatactaagcagttctttaacatttttaaatgttatacagtgttacagtatttagtttggcaaatgtttcaaaataaagtagaaatgtattcataacatcacagaaatgcacatccaatgttgttttcaataagaaccataggtacagatcagaactcttccctatatgaaataatttacacacagatgaatgctataatatcactatctaaaataatcactaaatacagttctttttcagaaataaacaagcaaagatttttttcattatcaaatatcaaaaacatgttgataatgtatgtttttcaaataaatgatactttaaaattataggaataatctcagtgaattcagtgaatgtgcaacctaaatcaaccaagtatactgtagtacaaccatattaagaaaccaatgatcagaaaatacaaccgtatgaaagaaatttataatccacaaaactttttcaggtcttaaggtaaaatagttccacagtctacaggtaaaaccaaggcaacaaaaatgcgtgcttatcttgattaagtaggtaattttatgcagaagatgtaacactttgtttgtagacagcatggtatgcatttctcagcaagacataaggaaaacaagattccaaaagatccattgtaaggaatggagattcttgtacaatcatatctagcagtaaataaacagattctctatttcttgttgtagttttatctgtctcctggccaa

SEQ ID NO: 482056 - DNA, 1000 bp, Homo Sapiens; identical to SEQ ID NO: 308734

SEQ ID NO: 482057 - DNA, 1000 bp, Homo Sapiens
tacccacttctttttctcctttctttttaatttcttgatactaagaggcaaagaaaagatttcttatagattgcctgagcttttgaatagttttcttttctttttttttggcacctaaatgatgaaaaactttatcctgcgtcaaggtatctggaaaatgaagctgcatttggggcacattatagatgaggaatgatccatatatgatgagtacaaaactcaattatagaattatttcttagctagtaccagatactccaaattacaaatgcttaagtaaaagtaaaatatcatttgccatactaaaaggctataagtgaaatataatagaatttaaaccagcagatataaatgcagcaactatgtgtatatttttttaaaatcaaatattgggggaaaaaatcaaatattgagaaaagctctggccttaaacacatctcacctgaaatccaaccagaaagccagtccatgattttagtaattttaattcattgtatgaaaaaaaattatgaatgctaggtgaatccagtgacaaaaagggcacttttttgattaaaactacaaaagaaacttgttttctgagaacattaaggaaaacattttaaatcattttcaaaatgtctaattgatatgatcttcagaaaaacatatctagtctgtatagaaattcatcttgaaataagaatgaggcagagtgatttttttaaagggatatatatccttcaggtcagtgtaacatgactgtgatcatcttacaaacaaaactcaaagtcaattcagagagtagtgtggccttggagaccacccacacccaacacaattgtacatactggactttgctgtccagttaaggagtgagcaaatgagttcagtatcaaaggtcatgttttcacagtcattccaattatatcccaaaaacttttcttgtattctctaccttttgacttttttaaaaaaagaactgattgcagagtatacagaaatcctgctatactttata

SEQ ID NO: 482058 - DNA, 1000 bp, Homo Sapiens; identical to SEQ ID NO: 308739

SEQ ID NO: 482059 - DNA, 1000 bp, Homo Sapiens; identical to SEQ ID NO: 308740

SEQ ID NO: 482060 - DNA, 1000 bp, Homo Sapiens
gatccctgaggctttttgccttcctgttgccccaaccccgcctcccactttttttttaagaagcaaggtcttgctctgtcacccaggctagggtatagtgacatgattgtagctcactgcagcctggaactcctgggctcaggaggtcctcccacatcagcctcctgaatagctgagactacaggcatgcaccactgcacccagctaatttattttagtttattttttgtagagatgtggtctcattttgttgctcaggctagtcttgaactcctggcttcaagcgatccttccaccttggcctttcaaaatgtgaaattacaggcctgtgccaccacacctgcccacctccaacattcttctatatctttcagagaaattactgttaaatacatgactttgtggctatgtttcatctgatcttacatcactatgaaggctcattcctaggaagtcatctcccatggaaaagggggtgaagtcaaatcagaaaaggaccaaggactaattacagcaacaacaacaacaacaaagtataatcctggaatccaactgaggatacacaactgcctcctcaattagagcaattctttgggccatgatcactaacactttcagttgcatgttggctcacctctaatgtctacagcagtctatagactcatttttctttttcttttttttttttttttttttttttttgagacagagtctggctctgttgcccaggctggagtgcagtggcgcgatctcagctcactgcaagttccgcctcccaggttcacgccattctcctgcctcaacctcccgagtagctgggactacaggctcccgccaccacacccagctaattttttgtattttttaatagagacggggtttcaccgtgttagccaggatggtctcgatctcctgacctcgtgatccacccacttcagcctcccaaagtgctgggattacaggcgtgagccaccacgcccagcctatagactcatttttc

SEQ ID NO: 482061 - DNA, 1000 bp, Homo Sapiens
tttcttacatggacagtagcttactacagatgggctcttgcttgttattttttcactaaatagtatatcctggtgagcactccatgtcagttttacattgtctttctcgttctttgatagagatgcttggtactccattttatagacaaaccatagtttattcagtctcccatgaatgagcacttagatttgtaattccagaaatgctgcagtgaataaccttgagcgcatatatatattcccgttgttggaaatacatcttcaagacagattcctagaagtggtattgctgggtcaaattgcatatgtggttttgtgaggtattgccaagttccctttgcagtttgcactcccactagcaatgtacaagaatgcctgtttccccacagcccacagaacatatcgtcatccatgtctgtctttatttttccccatctgggtcttcctctcaatctatctcccatttatgagtctttctctccactcccatcagtctctcccactttctccacatttctctctctcttctctatctgcctctctcctccctccctccctccttggtccttgcctcacttccaggtgctgtcgctcgcctactccagtctacttctgtgtctgtctgtctttccctctgactttctctctccttggggacaggacttggatggcagcagcttgggtgtgagacgcacttggagtggcaaccacactgacactcacatgcccagacgtccctgtcgaagcgagagacgcagatggggctagagcagaggtgttgcgggagcccgggagagttgaaatatgccagggagtgtgggagccaagcatgggggctcgaaggcaggggcggggacagttggccaagagtcaaagaaagggggtttgatatcaccctcccaccgaaagcagctcaaagtccaaatgacagcctgtacagtaggcagagcactggcccagagttaaggaacctgtaccccagtctccgggcaaccagtaa

SEQ ID NO: 482062 - DNA, 1000 bp, Homo Sapiens
gccaggagcaaataagacaagactatagcaaatgtggctgaggctttattttgatcaggtaggcctaaggcaggggccatgctgcaggagcagggcctgtaaaccagtcaatgctgtcatgcaacacggggacagctcagggctgagctccacaggcgaggggccaggtaggcccttcaaagcagatacaaccactaacaggaaggaaggtcaggctggctttagtgcagggaagggtagtgttgggagggggatgttcatgaaggaaagtgggtagctgaggcttcaaagggcctgcatgggacaggggtttaggggaagtgaagaggcccaataaagtcttgggggtaaagatgggaataaacaggagaaaggaacgaggaggcaggtgctgggatgcagagtccagctgcgctgcacagcctgggcagcaggctgagtatgggctcctcactcccacctcctggccttcaaggcattacttgttgccccagacagccacccttgtgtacagaggttttgggaggaagcggctggacttcatgtaggcagagatcttctccaagccctgagaggggggaaaataaggccagaactcaaggtcagctgcccatgagggctgggacaaccccactgcagacacagcaggtcagggccctggccacagcctttccacgtgggctcaagtgctgaggcatcacacagcctcttagggtccccagatttgcggagttaactcttccaacttcctttaagtaatgttgtaccacagtaacagctaacacttatgaagattctacacggtgctgggtgctctgtacccaagagaaattacaacataagcttagaaaacccactcgactactctgcaaggctgaatctattatcaccatttctcatgtgggaaacagaagttcagtaacttcctcacactcaaatagctactaagggggacagagctgcaacgtagactggttctgtctctctccagttctggcct

SEQ ID NO: 482063 - DNA, 1000 bp, Homo Sapiens; identical to SEQ ID NO: 308744

SEQ ID NO: 482064 - DNA, 1000 bp, Homo Sapiens
gatctgggcagaaggaagatcctttcaggactactgtggagagcatattagagaggatcagctgtagaatgaagtcccagtgaggacattctgggacctgagccaggccaggggctggggatggagaggaggcaatggactggacaggtgttttgaaggcagtgtcctcccgtccaagactttgctcagcccagcagtcctgtgaagtggcaacacatttctatgcttttaaaaacctagctttcaagcaaaattgtgcactctgtcaaaaaaaatccataaatttatgataaaaaatgagcttccttcttaagtctcacactagcggtttctaccatcaatggttttctgtgtgtccttccagtaaaatggttatcttgatgcccactttatatgaacacagactttttctatacaaataggagtatataaaatagacacaacatttcttttccaagatgatgaattggaggcaatgtcagtgtgtctctcccctgtggaaggacaaaaaagtatgtagagattcacactgtgaactttctttccccaaaaaacaacacagaggcttaacaggaaacccaaaagaatccatagacccttcaaaagaagctgcaggctgcatcctactctgtgagacaggtgaaaaactgtgaatccccagagtgtgagagggggagagactgcctccagggtacacatcttcactggggagtctgaaaagccagaccacagggggaggccttaactctacccagagctggaactgatttagggagtggtaagaaatataaaaatagaagcagcagcagaaagtgccttgcaggcattcccaatctccagcatggactgagggaagccattccttattatatctcacaggagaccttgcagaagccagccaactagctcaggcaggggtcacaggttgaaatgcccaactgaatttcttgatataacctcaagtggggatgaactcccttgaccagaacccagggggcaa

SEQ ID NO: 482065 - DNA, 1000 bp, Homo Sapiens
tgtgcccagggtggagtacagtgacacaatttcagctcactgcaacctctgcctcccaggctcaagcgattctcctgcctcagtgttccaagtagctggagccacaggcgtgcaccaccacacccagctaacttttgtattttagtagagatggggttttgccacgttggccaggctggtctcaaactcctagcctcaagtgatccacccacgtcagcctcctaaagtgctgggattataggcatgagccaccgttcctggcctcaaacaatgtttttcttaaatggctgagacacacatctgtctaaaaactgtagaacatgcaagtgagcagtctgaagtcaagaaatctgtgacttaagtctctgtgacctgcatttatttactggcctaggtacttcaacacttcagggatgtcccccgctgcctcccccaccccagtcaagctcttgggagttaaagaatctctttcttttgtgagtttaaacgacttttgttccaagaacctctaaactgagcagttctgacaactccaccagagagacgaccacctttctcctctctgaggagctgtgtcagcatatccccaacagcagcattgcagcatccgatttattcttggaactaggatgtcagtgagaacaaaagctgccagacagcagccaggaataggggttgcatctcgcgagtagaaagtagtctaagagggctgggtgcagtggctcacgcctgtaatcccagcaccttgggaggccgaggcaggcggatcacgaggtcaggagatcgagaccatcctggctaacacggtgaaaccccgtctctactacaaatatgaaaaattagccgggcatggtggcgggcacctatagtcccagctactcgggagactgaggcaggagaatggcgtgaacccaggaggcagagcttgcagatagcgccactgcacttcagcctgggcgaaagagcgagactctgtctcaaaaaaaaaaaaaaaaagtag

SEQ ID NO: 482066 - DNA, 1000 bp, Homo Sapiens
cgctcattggaaggggttggggagagggcagagcaggtcctcccccagtcactggcggtctgggagatggtcagtctgctgcctgaagccccaacccccacagcggggaggtcaggggccctggtcaggctggggacttcaggccccctttgccctggcccccaggaacctcatcctcgctagaggcattggggtggggaccaggctgcgaggagtcatcctcaaacatttcagggttctccagcatctctcggattaagggaggcatcgggcctggaatctccatcttcagagtaatggccctttcagctcccttagtgctgatgccccggaggtcggtgattttcattagcatccttgggaacatgtagggctggctgggccgccggcgccgggcgtacagcctcagggcttccagcagtggctcctgcagcttgtccactttttcgggctcctccaggtccatgcggtctccgcagatgaggcagatggcgctgagcagccctgtctcggtgtcatccatctccaggggcaggagctgcccagcaaaggcaaagacaaggtctgtgaggggcccgaagccggcattgtgcatctgggtccggttcagggtcagcccgtcggagaaggtcatggtgtcctgctctggggtgtaccttgtgcagatacgcagcatcaggatatctaggcaggcagctttgagcagagtgatctggtcagcaatgctgagccctgtaaagccaggcaaccgcttggcaaactccacgatcttgatgatgcacttggtagccagctcactgaacttgtcccacagccccagatccagctgcacgcggtggtctgcactggagttcgtggtatacttgcccagctggcagagcgaggggaaagtctcctgatgggctttgctgaccttggtgatgagctcttctaactgagggctcagctcatagctgtcaggtgacccttcttccttcacctctttcttcttcttgttccg

SEQ ID NO: 482067 - DNA, 1000 bp, Homo Sapiens
ttttttgaggctttgctgtcctccagtgggttctttgctttgggcccacaggcaagggaagagagaaggcatggggaatcctgccagaagcttctgggacaagccttggaaggggtgtacattgcttctgcccacattccattgtctagagcccagtcacatggtgccacccagctgcaagggagagagactgtgaagtgtgatctctctgtgggcccaagaggaagaggaagcaggggtttggtggatatgtagcactgttgctgctccattgctttgggtaacaaataccgactcataggaggcagcctttaagtattggcttcactgatggggtagtaccgtttcattgtgacaattaaaagatgcatctggcatatttctcactggggttttatgacctgagtgatatccctgctgggatatcagtaacactgaccttcaaactcaggcgagttggctgtgaacaggctcccccagctctctcaggctggctggcccattgcttcactgtgaaaagctatgccctggagaacatgctggaacctggcttttcaggtggacgttcaggaaggtgtaggtgccaatgaggggaattgtgtcctgggaggctcatggcaaggtagaaaagtctcagtgagatggacatggttgagggctagaggacagtgctacaccttgtcaccactgaagcagtgagacagatcttggtggtgtgctcttcgtgtttcagattgaagactctgaggctggcggtcttctgtcaatgcagctttgcactcctcaggcacaggggtttacctgcatctgattctctgtggtcattccccacctcccccgcaaaaaaacacctacaggcatccatggtcaagtgtcttacggatttactgccattcataaagcctctaaacatcccttttttccttgaaatacatttgaggagctgtttgctttttatattagtctgggaatttgtccattaattatgatagttttgtgt

SEQ ID NO: 482068 - DNA, 1000 bp, Homo Sapiens; identical to SEQ ID NO: 308746

SEQ ID NO: 482069 - DNA, 1000 bp, Homo Sapiens; identical to SEQ ID NO: 308747

SEQ ID NO: 482070 - DNA, 1000 bp, Homo Sapiens; identical to SEQ ID NO: 308748

SEQ ID NO: 482071 - DNA, 1000 bp, Homo Sapiens
gatccctttaccattatgtaatggccttctttgtctcttttgatctttgttggtttaaagtctgttttatcagagactaggattgcaacccctgcctttttttgttttccatttccttggtagatcttcctccatccttttattttgagcctatgtgtgtctctgcacgtgagatgggtttcctgaatacagcacactgatgggtcttgactctttatccaatttgccagtctgtgtcttttaattggagaatttagtctatttacatttaaagttaatattgttatatgtgaatttgatcctgtcattatgatgttagctggttagctcgttagttgatgcagtttcttcctagtctcgatggtctttacattttggcatgattttgcagtggctggtaccagttgttcctttccatgtttagcgcttccttcaggaggtcttttagggcaggcctggtggtgacaaaatctctcagtatttgcttgtctcttaagtattttatttctccttcacttatgaagcttagttgggctggatatgaaattctgggttgaaaattcttttctttaagaatgttgaatattggcccccactctcttctggcttgtagggtttctgccaagagatccgctgttagtctgatgggcttccctttgagggtaacccgacctttctctctggctgcccttaacattttttccttcatttcaactttggtgaatctgacaattatgtgtcttggagttgctcttctcgaggagtatctttgtggcgttctctgtatttcctgaatctgaactttggcctgccttgctagattgggggagttctcctggataatatcctgcagagtgttttccaacttggttccattctccccgtcactttcaggtacaccaatcagacgtagatttggtcttttcacatagtcccatatttcttggaggctttgctcatttctttttattcttttttctctaaacttcccttctcactt

SEQ ID NO: 482072 - DNA, 1000 bp, Homo Sapiens; identical to SEQ ID NO: 308749

SEQ ID NO: 482073 - DNA, 1000 bp, Homo Sapiens; identical to SEQ ID NO: 308753

SEQ ID NO: 482074 - DNA, 98 bp, Homo Sapiens; identical to SEQ ID NO: 308754

SEQ ID NO: 482075 - DNA, 88 bp, Homo Sapiens; identical to SEQ ID NO: 308755

SEQ ID NO: 482076 - DNA, 1000 bp, Homo Sapiens; identical to SEQ ID NO: 308756

SEQ ID NO: 482077 - DNA, 1000 bp, Homo Sapiens
gatccatgtcaatgatatagtatagattcatgttattggcatgtattgtgtatatccatgttattggcatgtattgtgcatatccgtgttattggcatgtattgtgtatatccatgttattggcatgcattgggtaactccatgttattggcatgtgctgtgtaggtccatgtgtggttttttttgggacagagtctcactctgtggcccaggctggagggcaatggtgcgatctcagctcactgcaacctctccctcctgggttccagcgattctcctgcctcagcctcccgagtagccgcgattacaggcatgtgccaccacgcccagctattttttgtatttttagtagagacaggatttcaccatgttggtcaggatggtcttgaactcctgacctcaggtgatccgccctcttcggcctcccaaagtgccgggaatataggcgtgagtcaccgcgcccggccagatccatgttattgtcatgcgctgtgcaggtccctgttattggcatgtgctgtttagatccatgttattggcatgtgctgtgtacatccatattattggcacgtgctgtatagatccatattattgtcatgtgttgtgtagatccatgttattggtatgtgttgtgcacagcaatgttattgatacgtatcgtgcctgtcaatcttactgacctaatacgatggaatggcgagcctggctctgtactcccacccctgggcgcgagggggcactcgaggcgctcctggctgcgggtcgcaagcaggccccgcccccgagccccgattggccgcgcgccgtccgcggcgtcgcacgcacgcaggccccgccccgtccgccccgcgccggcccggcgcgccctcccttggccggcggcgcttgttgttcggcggcggcggtcgcagctcgggtccccctcgggcgcccccgccgccgtccgcgcgcggccatggagctggaggtaccggacgaggcggagagcgctgaggcgggg

SEQ ID NO: 482078 - DNA, 1000 bp, Homo Sapiens; identical to SEQ ID NO: 308758

SEQ ID NO: 482079 - DNA, 1000 bp, Homo Sapiens
gaattcctgccggtcactgctccgcctcccacaggctacatgcagattcagggacagcacaagggctggcttggggtctgacaccagaggcactgctctcccagcaagttggagcctaaggtcaaatcctagggggtaatacgaggtaccccctgccttcagattgctgggagaggctggtagggcaagcccccaggttccctgcctgggccagtggccagtggccacaaactggtggtctcctagtgatactcagaatggcctctattcccacctctctaggcagataaggacaaagagggaggaacaggagggaggaacagaaatagaactcaagggtccatgtccctgagggaggcctccccactccatgcctcacccacttgcaccccctcctcttccccacacttcctcccccaacagactcccaagagaaacaggagctgggggtggcaggccaggcccaaaataacgccctgctgccaggacctcccccggcctcagcccttcagctgctttatagacacagctgtctgcaggcccagaccccaggccctggcccaagcccagggtctccacagggctggggcagggtccgactccaccccctgtagcccttttcaagggataccagctgtggccgccaggcaataggaaaacaacaacaatggggagtgggggccgccacagtaactgagctgagcacctactgtgtgcctggcaggcactctcggtggatctgcataacatgctccagagactggggctgcaacctccatcttgcaaagaagacaactgaggctggcaggggttagctctcgcctcataaagcttgtgagcaacaggcaggactggaactcaggctggcctgccttcagatcccacattccttccactaggcctaactgcacacacacaaatccaccccacaccccacgccaacataaatacacactaattctcccaatgccaccgataaacaccacaggctctacggagg

SEQ ID NO: 482080 - DNA, 1000 bp, Homo Sapiens; identical to SEQ ID NO: 308760

SEQ ID NO: 482081 - DNA, 1000 bp, Homo Sapiens; identical to SEQ ID NO: 308761

SEQ ID NO: 482082 - DNA, 1000 bp, Homo Sapiens; identical to SEQ ID NO: 308762

SEQ ID NO: 482083 - DNA, 1000 bp, Homo Sapiens; identical to SEQ ID NO: 308763

SEQ ID NO: 482084 - DNA, 1000 bp, Homo Sapiens
agacttcagcaaacggggcatctaggctattgttcagaggaaccgcaggaccaggcgagcgccgcggggcgcgcggatctggggagaaaaggcgcgaaccccgtacagttgtgtgtatgggaagggggacaggtatgttgcaaggcgggggagcacaggtgactctgggccacgactaaggaataaagactcaacttccagaccgaaaaagacaagggcggtcattcctgaggcttaaactgctgggcacagagggtgacgagcctgggagggtctgatgagaggatcccggaacccaccagggtggggttttggggaggctggagaactgaggggggacagccaggaatattcaaagaaaaggctctgcaatcgaaaggccagcctagaaatccccagacaatggacaatgcgcgggctgggggttgtagaggaggtgaagctgggtgggcagagggaaacaaaagagagaagccctcaagtgtgggcccggcggcggcgattacctgagagagctgccggggattggggcagccgaagagagcggagctggagctgaagctgatggctcctcggcggctgaggacgtgctgggggaccggcctgtccaggggcagtaccggcagctggtaacacacttccattgaatacgcccgccctgcctccgcgcggcgcccgccctgccgcggccgccggcccctgcagtgggagggggccgcggctcgggggctccgggccgagacgggggcagggcgggcggggaccgaccccgggctgggaagccgcgctcacgcctccccaaccccagccctccgctcgggccgccggcgggaaggctccgcggcggccgcggcgccaattacaaggaccggcgcgcgcctcgctccaggcgaggggggacggggtgcaagcggggccagcacaggcaaagtcggaaagggaaccccgccgccctggggctcctcggccgagaggagcaggtacccggactgcagagttc

SEQ ID NO: 482085 - DNA, 1000 bp, Homo Sapiens
gggccgtgtggcgggtgggcgccctgcagccctgcgtgctgacctgctggcgacgtcctcctcggcgcccgtgtccagcacgctgctcaggttgtgctcggcctgagtctcctccggtacctcctgcagtgcctcagcctgcctcagggacaggcggtagttctccagctcgatccgctctggggtgcccctcagtcgcttggcgatgctgggctcctccaggccgttcacgcctgaacctggggttctctcagtggagctggccacggcgttggcccgtccgtttgcatctgtggtggcgccatcctgcaggggtcctttggcctcctttccagacaggggagccactgccggtctcttcctttgtgcgtagccagagagtcgatagcagtagtgtggcttacagtagaatttaccatcctcgatgtcgtaggcgtaggccgagaggcgcagggtggtggcgcagtactcgcacttgaagcagctccggtggaagaacttgccctcggcactcagcctctccatcacgtagacccgcttctggcagaagtagcatgtgtcgctgcctcccaggttctgcgggaactccttcttcatggagccctgtttccaccggggggtgggggcagggcgaacctgcccaggcaggcagcaggacggctggctggccccacgctcttgtgtcagctgtctccgtatgccgatggactgtgcgggcgcattctcttcaaatttggccagcagctgggtcgccatgtacttcactttgttctggttcccaacggcaacgtccatcctcctgtctgtcagagtgctcaccagggtcggtctttctcctctgtggccccgaggagcttcctcctcctctgattgactggtctttctcctcttcccagcaccatccaagtccttttcctttttatccttgggagaacgcttccgagagatggtctggccaagtttgcttaggaaggagataggggatctggtgctggctatc

SEQ ID NO: 482086 - DNA, 1000 bp, Homo Sapiens
cccatggctggctgctgtggcgggtgctgaattccactctgttaatgatctcaataaacctctgcaacggttcattatccctctgtgaaaactaagtctcaacaagataccacaaccaagggcatttacctggcaagcagtgcattcaggattaaaagttggctttagctttatgtctttccactatacccatggccacagaaagaaacatgaaaaggtgggagcgacctagagccctggcctgggagttccaatccctgcatgtgccgcgtgacctttcttgggcaaaacccaccagctccgtgcttgtgcatctgcgaggccctgctgggaaggagtcacctgacaccttgtcctgtacacagcacatctgtccccctcccctctggctcctgacacccacgatccctgccttctccggtattctgtcatttgcttgtcccactaaatcaccaaaatattttggaaatatcaaccttgtctcgggcacctggagggagtcccataatcccatcaggtcacatgacccaagtttcggtttgcagaataaaacggccctgtaaatggtgaggccccaatcaagggccggctcagggacatcccatggaaagcctctgtgtccacacaccctcaagaacctgagggcagagggtgcaatctaatgggaacagttgtcctcgacctcgaaggccccatcatgtggtcaggaggcagcaaaccagagaaccccccaggacaaatccagtccaccctggacacacagtatcagccaacccttgattgaaattcaggctagtggccgggcgtggtggctcacgcctgtaatcccagcactttgggaggccaaggtgggtggatcacaaggtcaggagatcgagaccatcctggttaacacggtgaaaccccgtctctactaaaaatacaaaaaattagccaggcgtcgtagcatgcgcctgtagtcccagctgctcaggaggccgaggcaggaggatggcgtgaa

SEQ ID NO: 482087 - DNA, 1000 bp, Homo Sapiens
tttttttttttttttttgacaactgggccatcatttattattgatacaaatttatatagtagcatatgctattgaagaaatcagaaattcgtaacacacaaattcatattggaaatacaaaaaaaaaaaatcaaaatcatttgagggtcaagaacacaggttgacagcaccacaaatgtttttctcagtctgagcaggggagaactaggaataacaaaaacctacaagagaccaggaacacttattgttaagattgtgcaaacacttttcttcacaatttcccaccctgcaataggaacctgcaggggtttcccaaagaccttggtacagtaaaggggctgacaaggcagaaaaatggtgcagacaattacttcttttgacctccacagccagcacctggcagcaagagcaaccctgctgagggtttttatttttatttttttctgttcttctcacctgaaggtacaatctaaaaggttagtaaaaacacacacaaggcattagtgaagaagtaagaaacgctgaaagcaaagctttcactgaaatagaatccacattagtcaccaaattatccagtcccaaagatgaagtacaaaacgtaaatgaaatgaatgactcaacactcctcaaaaggcaaacctcggctctatacctcttaacgcttcctgcgtcagaagtaggcatccaccagagaaggctggcttctaataaagcgtcttaggggcgaggctgggaggcagggctatttcaggggctgttctctcatccagagttcacaacgaccaggtccacacaggctcctgtctttcactgcccacctgtacacaaaggccttcagattcagcctctcttcccgcgccaggctctgccatctcttcacatgtatgtgtcccactaggtgtaaaggaaggtatgtgtgtgggtgtggagcccactgaaagctctaatgtgcaaacatctggacagcgggaggtgtgaccagtaatgggccaatgggaag

SEQ ID NO: 482088 - DNA, 1000 bp, Homo Sapiens
gatcatgcttggagtttctgtgttcaattctgaacactccagtttcagaaattttatgaatcagagggaccaaaacaaaccagagggcttccaggaggtggttaccaaaatggcaagggcactaggagccatgtgaaatgtgggaggcattagggactggtgatattcaggctggagaggagacagcttcctggggagaagggtggaagggagacataagagctgcctttggtatttcaaatgctgtcctgttacaggaaaatcagctttcacctgggtcatcccttaagagaaaaaaaagaccaacaagtaaaggtgacagagagtcagccttgggctccctaaatcataacaattgtcctcaatcacagcagctgccgtcctgctatgtgccggtatctttacatattagctggtttaatccctggaaccatcctacaagctagacatggaagaatggaagaattttacaaccaaagctgacctttgaatgacagtgacacctcttctgggatgttctaaaggggaccctacattgggttaaaagataatctgtagatcctgctaattttaggcgtcagttccagggccctgcgatctttgtcagccctggcaccagatggcgctgcctcaaagacgcagaccagtggcatttctgggccttgaaaaaggaggcaatggatgaggcggcacagggtccatggtgggggtggacctggagaaagcggcgggtgctcctgtggaccctcccacatactcaccccagagccaacagtcgggttgggcatccagcaaaggcttggggaacctcgctggcaccagccccgtcttggcagtatggacacagctgaacaatgccctccaccgccaaggaaggacgtggatgggcagccctccctcagacctgaaaactagtgcctgctacaaagccccaaaccctaaactagagtgccgaaaccaagaagctctcatacctgagaaggcaaccccacaggtgaaa

SEQ ID NO: 482089 - DNA, 1000 bp, Homo Sapiens
gatcccctgccccttccccttctattacccctgaacctgggcatgaagccccagacctccctgtaacactcagcacccttacttcctgtctcagcacaccccattctgcacatcttagctctggcagcttcccgagcccccacatctggcataagacagcccctcctcctgccttcccctgctttgtggttcccagggctcgagctggcagggacagctgcagcctcaacagctggggctggggcggggggggggggggcgtgggaactgtggatggggggactccctgcacccgcagagacgcccccatccccatgcagctgttgcctggtggagggagggagggggtttgtcacttgggcctggggttcctgggcacctggctgatcctccaccttccttcacccccacacagcccccccttgcctggacggaagcccgtgtgcaaatggaggtcgttgcacccagctgccctcccgggaggctgcctgcctgtgagtgcctggctcagagccaccagtgggccctgtgtgtgggggcgggggggaggggcgatttgtcttctccctctgcctctgtgttcaccatggatgtctctaccacttcctacatgtgtgtggcttgggcaacctctcgtgtttccccattggaaactgagcaggggctctgcactcttcttggcatgggttcaagtcccacatcatgttgctgaccggctaggaattaaactctttacatctcagtgtcatggtctgcaaaatgggcccagtaatcccagcttcacagttcttggccacctgaggtcacatgtaaagccccccatgaggtaggtattattcaatcaacaaactatcagggaccaatcgcagtggctcacaccctccacacccctcccatctctcaacatttagtggagggggacataggaggcctataatacagtcccacactgccacttacttgcagtgtgactttgggctagtcactttccctctctgat

SEQ ID NO: 482090 - DNA, 1000 bp, Homo Sapiens; identical to SEQ ID NO: 308765

SEQ ID NO: 482091 - DNA, 1000 bp, Homo Sapiens; identical to SEQ ID NO: 308766

SEQ ID NO: 482092 - DNA, 1000 bp, Homo Sapiens
tttattataagccatgaccagcagcctcccctgccccatacccctgcggttaccacctcactcccagaggccagttgcactctctcaggccagggaggaccggaggtcccagccttagctgggagctggtgcaggtagatacactcagatttgaaggggcagcggccattccctcgcacgaagaaccggcatcggatctggctatgagagagaagacgacgaccatcaccttcaaaacctgttaccccaagaacaaggggcactcaaggctgacacataaggttgggcaggttgtacacagcaccaaagccccgcatctaagcggacaccactagcatcatagtgtagcttttacatttattctatcttccagcagatggcagtaaagtatcttaaggggcccctttctgtacttctcagtctctgagccagcaacagcagcggccctgggaacctcctttcatttttctggtttattttgtttgttttttgggttttttgtttgtttgtttgtttgagatggagtcttgctctgtcacccaggctggagtgcagtggtgcaatctcggctcattgcaacacccacctctggggttcaagcaattctcctgtctcagcctcccgagtagctgggactacaggtgcatgccaccacgtgcagctaattttcatatttttagtagaggtggggtttcacaaaattggccaggctggtcttgaactcctgacctcaggttatccaaccacctcagcctcccaaagtgctgggattacaggtgtgaaccactataccagacttttttttgtttttgagatggagtttcacatttgttgcccaggttggagtgcagtatcatgatctgggctcactgaaacctccatctcccaagttcaggcgattctcctgcctcagcctcccaagtagctaggattacaggcacccaccaccacgcccatctaatttttttgtatttttagtagagacgggttttcaccatgt

SEQ ID NO: 482093 - DNA, 335 bp, Homo Sapiens
  misc_feature (23)..(23): n is a, c, g, or t
cagttcatgtggtcccaagccanttgtgtgtgtgtgtgtgtgtgtgtgtgtgtgtgtgtgtgtgtgtgtgtactgagctcttctacatccctttactcaccatatattgaccgtaagcctgtgcctgccttgtgctatagtatccatagcttatttatgaaatgtcattgagccagtaaggggaaggtaccagtgacctgccacagcagcaaaagaacagactcctatagaatcatcacatacacccttaatcccactgaaattcgattagcatgccaccacatggccacagcgacccctgccccctttcccttgcagtgacaatttactggatc

SEQ ID NO: 482094 - DNA, 1000 bp, Homo Sapiens
gtacgtctctagccacatattggaaacctactgttagtctgacccagccagggttctgttaagcacttttgttcctgaatcttcagtttattgaggactctgtttccttaggtccttccgtatactacccccggaaccattcttccttcccatttccccatcttgcagtgggtgatggccatgaagtcctgttccattcgagaaccagccagggttttgttggcagaggcccagtacaggagctgctccagtccacaagccctttggatatgaaaacaccttagaccccctttcccccaaaatgcgcgtgcacacacacacacacacaaaatattttatgcttttaggggctcttgaaccccttaattcacctgcgtctgggagccaagccttctgctaagaaagcaggggccacatgcaccccacctagccagaatggggtaggcagtgccatcatctcggccatatttgttcagtttgtcttcctctttttgtgcccccccagctctgctatccagtttcaccagcttccaggtgctccatcttctctcccctcatagggactagagtaagactccttagacacaacagtgcactgattcagactttaatggaggtgctcatttcaatgccacagaggtggtggcaactgtggaacgtggcatggggagtgagaggttgctctggtgcagctggaggaagaacagggaacctagggttggggagagatgtatagaggaaaactcccccaggcacacagcctccgctctggaccaacgcaggcttcagtgagtacacacaaaggaactgatgtcaaggccctttctatgacccttcccattctagcaagacctcccaccccagtcatcttgggatctacagccacatgaaatacagacacatcgttcccccaagtcaggccagttttaggccattgagttatggggaaatgattaatgggatgaatgaaaaacaaataaaataaataaataaataaata

SEQ ID NO: 482095 - DNA, 1000 bp, Homo Sapiens; identical to SEQ ID NO: 308767

SEQ ID NO: 482096 - DNA, 1000 bp, Homo Sapiens; identical to SEQ ID NO: 308768

SEQ ID NO: 482097 - DNA, 1000 bp, Homo Sapiens; identical to SEQ ID NO: 308771

SEQ ID NO: 482098 - DNA, 1000 bp, Homo Sapiens
ggctggggccgggggtggccacgggactcagcacaccccgctcgtaccgtagcggccgctcgcgctcccagaccccaacccccgcgttcggggcgccccctggttcgcaacccgtcagggctgcgccggccgccacggcccggggtccccaccgcgcggactgaggagcggcggagtccgggacatgctggctgaggagaggggcggaaggggcttctctccaggaccagtttagctgccgcctccttttccctcgggcacctctcgggactggagactcagtgtcgcctcccacctccgctggctgcaacagttacctcacggccccagcctggtccgttgggcgcgcgagcggcgggcgggcgctcctcccccgcgactgccccggccgggcgcgcgcccagcgcgcgctcacgacttgtcccgccgccacccgcgccgcggccgcccaacagggacgcgagccgggaccacgccgacccagcgtgcccaggccgaggaaagcgcggcggcggcagtccgaagacccaccgggactgaaagagaaggacgaggtcatcttcggacgggaggggcaagccagccatcctgggaccccaggcgtgcaggttctctttgagggtaagtcacggacacccagccagaatcccacaggtcactactggggtcttcgggaaagagggcgtttgtggtccccaaggggtgtgcttagtggggatgctgagctaagggtgggaggggaggggcgctgtctctaaccttagtccctttcagggtgggtcttcagactgtgaccagtttagggccagccaccaccaaggccatggcgaagaaaccctaatcgctgtggctagatctagcctcagaagcaacgtggattcttgggccacgcagcaggcccaggatccttgcagtggctcttagggaggaacgtgcacgtggagtgcactctagtagcactccacgtgcacgttcttgagtgttgctcaagaaccatctt

SEQ ID NO: 482099 - DNA, 1000 bp, Homo Sapiens; identical to SEQ ID NO: 308773

SEQ ID NO: 482100 - DNA, 1000 bp, Homo Sapiens; identical to SEQ ID NO: 308774

SEQ ID NO: 482101 - DNA, 1000 bp, Homo Sapiens; identical to SEQ ID NO: 308775

SEQ ID NO: 482102 - DNA, 1000 bp, Homo Sapiens; identical to SEQ ID NO: 308776

SEQ ID NO: 482103 - DNA, 1000 bp, Homo Sapiens; identical to SEQ ID NO: 308777

SEQ ID NO: 482104 - DNA, 1000 bp, Homo Sapiens; identical to SEQ ID NO: 119992

SEQ ID NO: 482105 - DNA, 1000 bp, Homo Sapiens; identical to SEQ ID NO: 308779

SEQ ID NO: 482106 - DNA, 1000 bp, Homo Sapiens; identical to SEQ ID NO: 119993

SEQ ID NO: 482107 - DNA, 1000 bp, Homo Sapiens; identical to SEQ ID NO: 119994

SEQ ID NO: 482108 - DNA, 1000 bp, Homo Sapiens
ttttattgttaataccttttttttttactttctaagacatttttacctgtctccaatagtgaagatattctccattttattttattttattttatttattttattttattttattttattttattttattttattttattttatttagattgtgtctcgctgtgttgcccaggctggagtgcagtggtgcgatctcagctcactgcaacctctacctcttgggttccaatgattctcctgcctcagcctcctgagtagctggaattacagacacccaccactatgtccaactaatttttgtatttttagtagagacagggtttcaccatgttggccagcctggtctcaaactcctgacctcaagtgatccacccacctcagcctcccaaagtgatggggttacagatgtgagccacggtgcccagcctgtctttaatttttaatttcaaattaatttatatgtgtggtatgatgtaggacccaaggttaatttttttctatgccaatatctcatttttctaccatttttccctaccatttactgacatgtgatttattttctttctcacattaaattgctttggcatttttgtcaaaaatcaattgatcatgggtctgtatgttgtccagtaaaccactgcaggtctatttccagactcactgtttttctttatgttttttgttttttgtggttttttttgagatggagtctcgctctgtcaccaggctggagtgcaatggcgcaatctcagctcactgcaacctccgtcttccgggttcaagagattctcctccctcagcctctcgagtagctgggactacaggcatgagccaccatgcccagctaatttttgtatttttagtagagacacagtttcatcatgttggccaggatggtcttgatctcttgacctttggcctcccaaagtgctgggattacaggcatgagccaccgctcccggcctattttttatccttatacttgaaaagtaatcctgac

SEQ ID NO: 482109 - DNA, 1000 bp, Homo Sapiens; identical to SEQ ID NO: 119995

SEQ ID NO: 482110 - DNA, 1000 bp, Homo Sapiens
cagaggaggagactgaggcaccagagctcaagtagcctactgaggtcacacatgagcctacatgagccatggagtggagtgaccaactggaggcacgaccaaatcgggcaacacacagccaggatcttaaagggaagagatgaccaggaggagggaagacaggaggatgggagaggagattggtgcctgattgtgtttggacacagtagggttcttatgagcggaggatgggagggggaaggttgagcatccatctctcccatctcctgtggccaggtctgttacagcagccagccctgcacgccttccccaacagcctcgctggggcagttcatggttcaaagcctacagccctccatctgagttactgtgagtctgtgtgaatataaaatacaaaaggcatctctgatgccctcacagcccctagaaccatggagaccatggtcataagtgaattcaaaagttgtctattaaacggggtgctgtaatgttccattttattttttcctacactggacacctgtgcactgatagagactcatatataggctgtaccttctgcccatggctgtggggaaccaggactgcagaggaagcatgtgagtgaagccaccggaagcaagcaaatggaacaaaaccagcaccacgaccaccaccaccaccaccaccaccatcaccaccatcaccacaatacaaatactctctttgattggtcctctgggtagataaaatgttatcaaatcacctccaagctttctttactgattcttcatctgctcaaactattttttaagatttgaacagaatgacacctaatgatcactgtctgaggagtttagggtttttattttcttgcctgtaacactcagtggtgaccaggacgaggagcatgtatgtgttgaagggtgcgggctgcgtgaagcctcccttctgccccatccgcaatccctgacatctcactactcacattcttagatcagtctccgccaggtctgaacat

SEQ ID NO: 482111 - DNA, 1000 bp, Homo Sapiens; identical to SEQ ID NO: 308783

SEQ ID NO: 482112 - DNA, 1000 bp, Homo Sapiens; identical to SEQ ID NO: 308784

SEQ ID NO: 482113 - DNA, 1000 bp, Homo Sapiens; identical to SEQ ID NO: 308785

SEQ ID NO: 482114 - DNA, 1000 bp, Homo Sapiens; identical to SEQ ID NO: 308786

SEQ ID NO: 482115 - DNA, 1000 bp, Homo Sapiens; identical to SEQ ID NO: 119996

SEQ ID NO: 482116 - DNA, 1000 bp, Homo Sapiens; identical to SEQ ID NO: 119997

SEQ ID NO: 482117 - DNA, 1000 bp, Homo Sapiens; identical to SEQ ID NO: 119998

SEQ ID NO: 482118 - DNA, 1000 bp, Homo Sapiens; identical to SEQ ID NO: 308790

SEQ ID NO: 482119 - DNA, 1000 bp, Homo Sapiens
gatccttgctgaaagctgtcaagggcactttcccatcctttgggtttaaacagaaagaccagctacatgtaaaagcccatcaccccaagacaacaagtggctctggtctgctagaaaggattcatgcagttttttaaaatgaactcagaaaagaaaagaacagaaagacaaaattgaagcagaattcactccaagataaataaatacttgaacaatgcaaacatttctcaggtccttctggtgtgacaaaatgtataggggccagacatggtggctcacatctgtagtccagctcctctggaggctgaggcaggaggatggcttgaacccagggaggtcgaggctgcaagtgaactgtgatggtgccactgcactccagcccgagggacacagcaagaccctgactcaaaaaaagaaatgcacagggaaattgttattactatcctttgctctgaacaaataccatccttatctgcattctgcagagctaaagaaaattcccccaggttggaggagtctacgttaaagctaagctttggaaggaatttaagaggtaatctgatccaattcctcagtctttcatggatctccttaacttgaggcaattgcctttcatatcagaagctgtgttatcagaaaccacagaggatgtatctcccctttaagggccatagtcattaataagtgacaggatcgtgtcatccttttttttctgattatagtagtgacatatgctcactactatagtgtagtgagcatttttcactgtgtagaaaaacacacagtgtggtttgtaatttttcctcatgtcattaagtactttttatgtcattaaatactttttgaaaatctctgtatctcttttttttttttcagacagggtctcactctgttgctcagactggagtgcagtggcacaatcacagctcactgccaccttgacctcctgggttcaagcaatcctcccctccttagcctcccaagtagctggaactacagg

SEQ ID NO: 482120 - DNA, 1000 bp, Homo Sapiens; identical to SEQ ID NO: 119999

SEQ ID NO: 482121 - DNA, 1000 bp, Homo Sapiens; identical to SEQ ID NO: 308792

SEQ ID NO: 482122 - DNA, 1000 bp, Homo Sapiens; identical to SEQ ID NO: 308793

SEQ ID NO: 482123 - DNA, 1000 bp, Homo Sapiens; identical to SEQ ID NO: 120000

SEQ ID NO: 482124 - DNA, 1000 bp, Homo Sapiens; identical to SEQ ID NO: 308795

SEQ ID NO: 482125 - DNA, 1000 bp, Homo Sapiens; identical to SEQ ID NO: 308796

SEQ ID NO: 482126 - DNA, 1000 bp, Homo Sapiens; identical to SEQ ID NO: 308797

SEQ ID NO: 482127 - DNA, 1000 bp, Homo Sapiens; identical to SEQ ID NO: 308798

SEQ ID NO: 482128 - DNA, 1000 bp, Homo Sapiens; identical to SEQ ID NO: 120001

SEQ ID NO: 482129 - DNA, 1000 bp, Homo Sapiens
gatccccgactccttgcacttcccaggtgaggttacgccccaccctgcttcagctcaccctccgtgggctgcacccactgtctaaccagtcccaatgagatgagccaggtacctcagctggaaatacagaaagcacccaccttctgcgttgatctcactgggaactgcagatcagagctgttcctattcggccatcttgccagcctcctggctgaaggtttttctacatttcttacatttatatgttttttatccagtgggacatctctgattaacagtaggggattggtgataactaaaggcttggccacatgcactacattcttaaggttcttctccagtatgacttctttgatgacaaattaaggataactttcttctgaacgccttcccacattcaaaacactgatagggcctttggccagtgtggagtctttgatgctgagcacaggatgagctatcactaaaagcctttccacattcagtacatttatagggtttctctccagtatgaattctttgatgttgagtaagattggaagtttggctgaaggctttcccgcattcattacactcataaggtttctctcctgtatgagttttctgatgttgggcaaggtgtgatctctgtttgaaagcatttccacattcaatacattcataaggcttctctccagtatgaattctctgatgagtagccagctgtgaactgattctaaaagcttttccacattctttacattcatagggtttttcaccagtatgaattctcaaatgactaacaaggtgtacattctgcctaaaggctttcccacattccttgcattcatacggtttctctccagaatgtactctttgatgctgagtgagtgatgcatgatggctaaaatctttcccacatatatcacattcataaggtttctctcctgtatgaattctctgatgtacagtacgggatgaacccgagctgaaggtttttccacacacaccacatttgtaa

SEQ ID NO: 482130 - DNA, 372 bp, Homo Sapiens
tactactggataaaaaattgtttgaccaattatccaaactgagctatacacatttattttcttttactctcattaacaaatttctaaaatatacttcttctttcatgtgaaatgagattagatgtggccattaaaatcagctcttagcagacattggaagaaaaagtatagctttctgcccaggtcctgttttggatccaagtttatactgcccagttcgtttcaatgccacataccaactggtgtatttccttgaccggtaagtattgtagttattagattccaatcgttcaaaaaagaaacactcatccgtaacacatttctgaaaaataaaggaagaattacctgttattattatcattattattatta

SEQ ID NO: 482131 - DNA, 1000 bp, Homo Sapiens
gatctttttcaggcctcctctggccatggccctctcctgctcctctttccagagttcccaagtctccgggatgcactccagctgctaagagaggcctcaaagtttgggtgatgtggcctccacagtcctcctgagcagccgcccacctacccttatcctttagctccattacatttcctttttctgtttaattttttgaataggtgttgtatttagatggctcagaaatttgcatctgtgtgtatccgtatatgtgtgcaggcatgaagagcctgtgtctcatacctgttccctgtgcacccaggtcctagccccacaccagcctcagtggccagctatgctgttcatgacctgcaaagctttctacagctgttttatgcaaaacaataggaattattgcaaattatggtaaaatatatataacatagaattcaacattttgaccactttttttcttttcttttctttcttttttttttttttttttgagaaggggcctcgttctgtcacccagcctggaatgcaatggggtgatctcagctcactgcaaccttcacctcctgggttcaaccgattctcctgtttcagcctcctgagtagctgggactacaggtgcatgccaccacacccggctaattttttctatttttagtagagaggggatttcatcatgttagccaggatggtctcgatctcctgacctcgtgatctgcctgcctcgacctcccaaagtgctgggattagacgtgagccacctcgcctggcccattttaaccacttttaagtgtacatccagtggcaggaagtacatttaggttgttgttcaaccaccaccactgtccatccccacccagaactttttcatattccccaactggaattctgtacccattaaacaccaactcctctttctccctccctccagccactgacaaccaccttttcattttctgtctatgcatttcatgacgttaggcacctctgttaagtggaatcatgc

SEQ ID NO: 482132 - DNA, 1000 bp, Homo Sapiens; identical to SEQ ID NO: 120002

SEQ ID NO: 482133 - DNA, 1000 bp, Homo Sapiens; identical to SEQ ID NO: 308801

SEQ ID NO: 482134 - DNA, 1000 bp, Homo Sapiens; identical to SEQ ID NO: 308803

SEQ ID NO: 482135 - DNA, 1000 bp, Homo Sapiens; identical to SEQ ID NO: 308804

SEQ ID NO: 482136 - DNA, 1000 bp, Homo Sapiens
gatccctggtggatcaagtatgtatccaaatatgtctatctaggcacacaaaaaatcagaccaagaggccaaggcgggaggatcgcttgaggccaggagtttgagaccagcctgggtaacacagcaagacctcatttctaaaaaaaatgtgttttttaattaggcaagtccaagtggtatatgcactctactcttcttctgtcccttaatgtttcaataaacatgctttgtgtaaagttaaacatgagaataaataaaacaaaccaaaaaacacaagataggtacggaagacagcacccaacctgcccgcaggggctggacagatccccacctcacctggctaaccccacggaagaaggcctcctcggcgaggcgggctggcccatccactgtcttgccgtcatcctcggggccccagctggcactgtagatgtggatgtggttggggttcaggcccagcgagcgtgcctccactgcatctgtcacctcgccatccagcatgcgcacccctggccgtgaagggggggcacgaagagggatgctgcatgggtccagctgtcagggcccccaccccaaggagcacacccggccctgcaccccaggggatgagtaagggaagggtggaggctgatgctgagaaaccctgaacccccaactacctgtttgcctctgcctttcaaagacaagacccagagaaggaaaaagagaacacctcctgcccccaaccacacattcaggactagaaagagtctctggttcccaaaagagcctggtgatcaaggatctgccacgtgaggactcacagtgggtcgtgaggatttcaggagactcctgctaggaaaccctcactccacaggggtccagctctttcagtctttgaccctttgggaaccctccgtggaacagccacgtgatcaaaggatccacagtcggaaagtggcaggcattggccagatgggaagtgggcgggaaaaattccactgaagggccctcctgaaga

SEQ ID NO: 482137 - DNA, 1000 bp, Homo Sapiens; identical to SEQ ID NO: 308806

SEQ ID NO: 482138 - DNA, 1000 bp, Homo Sapiens; identical to SEQ ID NO: 308807

SEQ ID NO: 482139 - DNA, 1000 bp, Homo Sapiens
ttggaatttctctctgtggtcttttgctaccgagcccaggcccagggaaggtgagggcaaatgcggcatggaaatagaacagcacctgttccctaagggagcgtctctcagtgggggccaagccttcctctgtgggaagaaggagcctgtgaagaggtgcggacaaggcaagagtgtcttggtcctcactgcccttacagctgaagctttctgtctggcaggggcaggggggaaggtgtcatgctggtgtagaaatacacagagtggttgaaggaagggcaaattcaagttgaagtagagaagctccatagtcatcatggccacggacccactgtggacctgagcagaagagagatggcagggagggtaaggatctgagaagggatccctggtgaggcctccggtcctggatgcgtggagcagcctctgaggaacctgcctctgagcaagtttagtgaggtgcgcaggaccaacacctgcggagagtggaggaggaggtgggggcagggagcagctgcattgtcagtgtggatggcccaggagggaggcgcctcttccatcaggggttctctccgtggatggacccaataccccctgccactggagggtctgggctccaggccctcagaggtgtggttggccacatgcgtggtgagtcaggggtccagggaggccttcgttgcagaagaaactccccaaccacagcgtgtggcccagcccaagggagagcctgggtctggccagagtgcctaatggtcagggctctagcttgataggggggagctgggaaagaggaaacaataatgtcccaaatctcaaagaaaaggccttaaaaatcaacacagtgccaggacggaaggctgtggctctgggatcccacacagccatggagatgacagctaaggcagtaacacaggtttcagcccccgctttcagatctgggtctgagaggactgatgcttggtgtgatgagaaatgtcagaacccacagcagaaagct

SEQ ID NO: 482140 - DNA, 1000 bp, Homo Sapiens
agagtaccttgtgtatatacacatgcacatatatacatcaaatacatacacacgcagtttaacagttcatttctcattagtataaaacagagattagaccactttattttgtttttaaaattaaaagttgtataacaaaacacccaaaagaaaataaaaattttatcaaattttggtacaagtatgagtaaatatagagtactcttcaaaaaagtagcattgaaccattttaattttaatatttatttcaaagtatttttaaaacactagataattttataaatgccacatataaatatacagacccaaaatatagcagtactattaatgcaagagaagtaaactaataagatgcttaaacaaatatgacaataaaatcagttttcatggctattaatttttcatgaatttaaaaaactattcagaaataaaatatagttagtatatcatgattactattgaagtctagacttgcagaaacaacataaaagtacttgtaaaaagttcccatctaaatggatataaagttttaggttttggttaacatactaaatttggtgggaaaatcttaaattaatgtctcctttatataatattcttgagtttttacacaccattattgatacgattaaaaactcaatgtataccccctataacattgcattttagttttgaaatagcaagtattgagattatttcaaatgtgggtaaagaaaattagtaatataatcaaggcagaaaagaatgcatttaatttagcttagctcagggaaacgttaatgcctctgatcactatttgcaaagaccatttgtaaactatgatagaaattattatacctgccctgccagcagtttttatttgcaccttatgagatcatattgactctgtagaacatgatgctcttataataaaagaaatgttgaaatgctgatggtaggctaggcacagtgtaggtactcaatattattaattcaaaataaaaaagcattatttctacac

SEQ ID NO: 482141 - DNA, 1000 bp, Homo Sapiens; identical to SEQ ID NO: 308808

SEQ ID NO: 482142 - DNA, 1000 bp, Homo Sapiens
cattcttcctttttctttctctctttctatcacacatgcttttgtaccataaaaactaagcttctgagatcctttaaacttaatatccaggcgtcagcagcttcgagccagtcctcacgtctgaagaacttgataagcttctcatcccaaattaactgaaaaggtgcggggctactatgtcatgacgcactgaccaacaaacatctcagtgtactattcctcaacagcgctataaaactctaaagccaggtatcctctaggaggctctcaggatgcagctcactcccctttccttggaggccttcagtctccagttaaggtgcctaccttctggagcctgactgacagatggcaaagaaaaaggaaggcaaggctacagaaatgatcctccccagccaatctacttcaagagtgactccatgatatgctccaaatgaaaaaacaaaacaaaacacaatacaaacacaaacttctcacggattgggagcaagcagtccagaccactttaacactgagagcaatccggtggctgaggtgatccagtgttctttacctgtactcactgctacagacacagcttcgggaaatccttgtcaaacagccagaggttaccctgaaggcccacaggagttagaaaaagagactcaaaggcatcgtggagtccagagtgctgagcagaggcgtagcttgtcttcaaaaatgtctggattattccttccagtggtactgtcagctgtcagggtcgtgcctttggctgatggaggagggaattgttcgtcaatccttgtgcccctgagatgttgcctgtgtgtttcatgtggacgttgttcatagctggcaacttggcaacctttgtgggtttgctgccactgttgccaacagtgctagagcctggagagcactttcttttcttccctatgagtttgtctagaggagtgtgtgagtgtgggttgacaggcagttcactagcctggtggatgaatgggccgagagagagagt

SEQ ID NO: 482143 - DNA, 1000 bp, Homo Sapiens
agctcaggagtttgaggttagcatgatacacaggatgaaaccccatctcttaaaaaaaaaaatatatatatatatatatatataaattagccgaggatgctggtgtttgcttgtagtcccatctgctctggaggctgaggtgagaggatcgcttgagcccattggggtcaaggctgcagtgaactgttagtgtcactgcactgtagcctgggcaacagagccagaccttgtctcaaaaacaaataaacaaaaacttttaaaaaataaatggtatacgaacatcagggaaaaaactataaattatctagttgtattaaataaaaatcttttcatcatttattttctatcaagaaaagggggaatgtttatgcataattctattgcccaggctggagtgcagtggtgccatctcggctcactgcaacctctgcctcctgggctcaagcgattctcctgcctcagcctcctgagtagctgggattacaggcgtgtgccaccaggcccagctaattttttttgtatttttagtagagacggaggtttcacccgtgttagccaggatggtctcgatctcctgacctcgttatccgtctgcctcggccttccaatgtgctgggattacaggcgtgagccactgtgcccggctattctctaaaatctaaaaagttggaatttaaacccatatttatttctttgcaatgagaattattatttgcccttccatcagaatggctaatggtggctaggtatatatgtttttctgtaaaatatattgtaatatattttcacaaaattaattaataatgtcatatgcatatatgcttgtgttcatattgtatctttttctattacaagtatatttatatttacattttattacattttcataaactaggttactttttctattagtcacgttatggaactaaaacaataaaatcattcactaaagatgccacataatgtatcattcactgatgttttctatttaagtttgaag

SEQ ID NO: 482144 - DNA, 1000 bp, Homo Sapiens; identical to SEQ ID NO: 308811

SEQ ID NO: 482145 - DNA, 1000 bp, Homo Sapiens; identical to SEQ ID NO: 308813

SEQ ID NO: 482146 - DNA, 1000 bp, Homo Sapiens; identical to SEQ ID NO: 308814

SEQ ID NO: 482147 - DNA, 1000 bp, Homo Sapiens; identical to SEQ ID NO: 308815

SEQ ID NO: 482148 - DNA, 1000 bp, Homo Sapiens
gatcacgccactgtactccagcctgggcgacagagcaagactccatctcaaaaaaaaaaaaaaaaaaaaaaaaaaaaaagtctcagtcttcaggcagttggccaggaccaaaacctctcgaactttttttttttaattattattatactttaagttttagggtacatgtgcacaatgtgcaggtttgttacatatgtatacatgtgccatgctggtgtgctgcacccattaactcgtcatttagcattaggtatatctcctaatgctatccctcccccctccccgctagaactttttttaatgctgcaaataacatgatgttttaatatatgtacacattgtggaatggctaaatcaagctaattaacatatgcattatttcacatacttatttttttgtggtgtgagaaaacttaaaatctattattttagtaagtttcaagcatataacacattgttatgaatgagagtcaccctgttgtacaacagatctctaggatgactttcaagtcacccctgattcatgcttcctctcacaccccatgtttaatttcttggcgctaccttcaaaaaagatcccagttcctgacccttctcaactcatctattagcaccaccctcttccagaaccactatcctttcttgcccaggcaaggacaccagctttctcatctcctgcttccgcccctgcaggccattctcctcacagcaaccagcactgttttcactgaacatttttgcgcatagctaataattacgtggtttaaaaaaacaacaacgctttttaagttcccatagccctgacccacatctgtctataaccctcatccctataggcaatcactgttaatttttgttgttcactggagaagtctttgtaaacattaattggaacaagccggtgcttgtttgtagccctgcaatggctttgttacatttggaagtaaattccaaatgcttaccatggcctgtaagactttatgtaaactggccctgtcta

SEQ ID NO: 482149 - DNA, 1000 bp, Homo Sapiens
  misc_feature (314)..(314): n is a, c, g, or t
  misc_feature (568)..(568): n is a, c, g, or t
  misc_feature (622)..(622): n is a, c, g, or t
  misc_feature (626)..(626): n is a, c, g, or t
tactatatgatttcatttatgtagaacgtccagaaggccaatctacagagacagtcgattcgtggttgcagagggcttggggtggccgatgggttggggagtgttggctgatgggtgcaggatttctctttggggtgataaactttctaaaattgatctagtgataatggttgcacaactctgaatataccaaaagtcatcaaattgtacactttaaatggatacaaattgtatgtgaacttaatctcaataaagccgtgacaaaagtttccaacatgaactcttatttggaaagctttctccctgcctcactngtttcctcctctcctttttccctgaactgcctctctcgactcctgtgtttgatgtgccttaactcttaggatactgccattttgtctgacagtccatgtcgtgaccaaagttaattccctttccaataagggtctctgttcaggcatttctatccaaaatagatttgtcctgtgtcctaaggccagggataagtccccccaccccccccccacccccaacaccctgttgtgatgtgtttatatttgaagagaanattgggcggggaaaaagcattttccgaagttcaagcatacagcatagggactanaaanatgctggggttggatataaaataattgagcccccaaagcatcaagaaggatgtttggggcttttagaaggctgcctgttcacagaaaaggtgaatgtgttgtccagcactgtattagcgcgagtctagtcacttgccttggcatttgaaaatgaaaagtaactcggaaatgagctgctagcaaagactaccctgtgtctggggccagaacagtctttagagcagcctcgtcctctgattccaccacctgctctccatatccctctcctgcccctcccccgtgttaacagcctctcccaggaaggggcctggaaactcagcgtgcgctctaagtgccaatgaggcctcccaatctaagcgccgcctccaggaacg

SEQ ID NO: 482150 - DNA, 1000 bp, Homo Sapiens; identical to SEQ ID NO: 308820

SEQ ID NO: 482151 - DNA, 1000 bp, Homo Sapiens
gatcatatgcatggaatcacaacatatgtattttggtcaacagcttcttatttcctttgttctgccttcctccctcccctcctccacgtccagttctctccatctttcaaattcaggctcactccttctcccatggattactccaattgttccccctttttatcgctattggtcatgtctggacttggaataaaccctttctgtccacatgggccctgtctgcctgctgaccttcctctcactcctggcctcaacatcatcattcattcatcaaacactaagtgtctcattttgggggcacccctgaacctgtgatccctcggagttgaccgggcaagaagatctccttacgaagcagagacagcaagtggcgggggtgggggtgggggggcccagttggcacaggattaaaatacaagggcacccaacctcaccagtcatgaggaacaagaagccaccatgaggcatttcaaacccaacacccaacataaatgaaaagtctggcaacaccagcagttttggaggcaggtagaaaccctcaatggtgggagagcacattggtgaaatcactgtgaagaatgtggaaatacctggaaatgttgaaaacgtccagattctgaagcttagcctctccccacttggctttataccctagtgagctccatggaacttaagaaaatggctttggtctggggccaaacccattttcttagatgggttgacttaagaagatgggcccttgtctgtgggtagatggtcacgggggaccgggtcagtggtggcttggtcactgggggggactgatcagtgggacccagtctgcagggcttggtcagcacagaacacgatcagtccggcttagtcaacaggacctggtgggtggggacctggtgagtgggggcctggttagtggggacttagtaaggacgaggtcagctggctgctgggtgacctcaggcagggggtttgtcctagaagcctcctttcttccatttgtagg

SEQ ID NO: 482152 - DNA, 1000 bp, Homo Sapiens
tcatctatttggaggtcactgacacaaaaaaacaaaaacaacaaagacaaaacaagcctccttaccctagctcagaaggataagccaaaagaaaacaggttaacggtaaaaatgtatgattaaatgaagttattgttttttttcctccacttcatattgattctcttttcccatgtcaatttaaggtggtaaccatggccaacaacattctctctcacctatcatactaatgccatataagtagtagtgtttttgttttttcaagtggggaaatatatacagctcaaaaaaacaaaaaaatatctagcaactaactccttggcagttcccttgactctctgacctttaagtcccaaggttctaagtatacaatgaataagaaaactacctgttcaaacccaacagaatatgtttttttctggtttgattaaggcttcgaatttggaacataaatactctcagtaatacttagtaattcatgaagttactgcttgtgtaaacttgcagaatatttaactttaggagattataaatcctaacatgcccctaggggccttctgcttttattcctacatacaaaacatacaacatgtttgtttttaaaaacaatgcacataggccaggtgtggtggcacacacctgtagtcccagctacttgggaggctgaggcagaagcatcacttgaacccaggaggcagaggttgcaatgagccgagatcatgtcactgcactccagcctgggtgacagagcgagacgctgtctcaaaataaatacatacatacatacaaaaaaattaaaccaatacacggaagtattacttccataaaacaaaccaggaagtacagtaaaacagaaaacattagcatttgggccttttgtgtgaattacatttctccaccttcaacccagaaaagggatctgagtgtcaatgtgacataaatgacatagcaacagtgtgaggtctcccaatgaagggaggtattagaagaaaatccaagc

SEQ ID NO: 482153 - DNA, 1000 bp, Homo Sapiens
actgcagcttagaaaacagggtgcttggaaggagtggggcatgacaaagggggacgtaaagagaaatcagacaatggtaaagaagcttgaaaattttatttaattgtatctttgatacattgaaagctgagtatttttaagacaaaggtttcaggaagaaagttctctttccaatttcaccactgtggctaccagttcttctattctcctattattataatgcagatatgtcagatcggaataatttacatttacaaattatatcatagaaaaataattttatcgctaaatgtaaacaggttggggtacttcatccaaaataagaagaaaataacagaatctagcactttcatattttaaagctgatattttagcaatattttgataaaactttattccatttgtaatttttggctacacaacactaaaagaaaatttatttattggcatgcaaagcaatgtggcctcagaatacacctcttaaatttacaggacttaacatttcaaacatcccacgtggctagcaggtgatgttgtgaagatgatcttgaatagtgatatagttatttcctagagattaaaaaaagaaaatgatttaacataattataataagatgatatcattaacttatccagaaaatatttcaatgatttattttgataaaagttgtttattaatccctttgtccataaatccctccatcctttggactcttaaaatattttcatttaaagattatttatcctaaagtctgctcatcaatgctatcaaacaattatgaataattattaaaaaatcaaaattcatcaagataagtatttttcggtgtccagttctcactactcttcttattaaattaagtatgtaatattgtatatgctgcatttcaccttgtgctgaaatttcaacatagcaatttttaatgtgacaatatgtgaatgatgtaacatttcccatgtttcatttctatctgtgtttctagcttcttgactctaatag

SEQ ID NO: 482154 - DNA, 1000 bp, Homo Sapiens
ggccaggctgattcttgaactcctgacctcaggtgatccccctgtctcggcctcccaaagtgctgggattccaggcatgagccaccaccctcggttctgtttttttttttttttttttttgtagagacggggtcttgctatgttgcccaggctggtctccaactcctggcctcaagcgatcctcccaccttggcctcccaaagtgctgggactgcaggcgtgagccactgagcttggccctcctccagcttctagaagtttcttgcattccttagctcaaggcccccttccgtcttcaacactcacgatggcccatggactctctcacactcaatcattctgactctgaagtgctgcttgactttcagctccttctcccgtcttcaaagggctttgcttcctttgttgtcacagcccctctgactcacgcttcctgtgtccttctcgattataaggatctgtgtgattacataaagagcctgccagggcaatccaggataatctccccaaagcacgatcctgaacttaatcatggctgcattcttttgtcatataacgtaacattcacaggggattaggatgtagacgtcactggggggccgttattcgcctttcacagcaccctgcccctcaaagccacagtctcggcagtgccttacctggccctgcgccatgtgcccctccgtccatctcctgacgtcaacttccacccaccttttcctccttccccaccctctccaccacactggcctccttgctgctccttttttttttttttttttgaggtggagtcttgctctgtcacccaggctggagtgcaggggcacgatcttggcccactgcaaactccgcctcccgggttcaagtgattttcctgcctcagcctccccagttgctgggattacaggtgcccaccaccatgcccggctaatttttgtatttttaatagagaaggggtttcaccatgttggccaggctggtcttgaacccctgacctcaa

SEQ ID NO: 482155 - DNA, 442 bp, Homo Sapiens
  misc_feature (13)..(13): n is a, c, g, or t
  misc_feature (342)..(342): n is a, c, g, or t
cgagtgagagagngaccctcaggatagaaaattgtagagcatgtgagttatttcctttgtatgtttttattagctacgaactgaacatgtatgtcttttaaattcattcattgccccatgtgtagttcgatgtattttgaccttttcttttatttattttaaaattttgattacttagttacacaaataaagagctaataaatactatcagggagacagcccttggaatattgaattttatattttcttctgcgacagtcttgctctgtccgtgcagtggcaagatcacagctcacctcctgggctcaagctatcctcctacctcagcctcccaagtagctntgactacaggcgacagccaccatgcccagctaattttttgtatttttttgtaaagacagggttttgccatgttgcccacgctgctctcgaactcccgggc

SEQ ID NO: 482156 - DNA, 376 bp, Homo Sapiens; identical to SEQ ID NO: 308826
  misc_feature (181)..(181): n is a, c, g, or t
  misc_feature (289)..(289): n is a, c, g, or t

SEQ ID NO: 482157 - DNA, 1000 bp, Homo Sapiens; identical to SEQ ID NO: 308828

SEQ ID NO: 482158 - DNA, 1000 bp, Homo Sapiens; identical to SEQ ID NO: 120004

SEQ ID NO: 482159 - DNA, 1000 bp, Homo Sapiens; identical to SEQ ID NO: 308830

SEQ ID NO: 482160 - DNA, 1000 bp, Homo Sapiens
aacactgaaaccatctcaaaaagaagacacagtacacagtgtttcaaaatgtggatattgtttacttgaagcaacagtccaggattgtgaagtacaacacattttaaggatgagactttcctttcatggtcaagcaccagcatcatgcacacagcatcaggttatttaaaacaacacgcctgtgggaccccgttcctggaggaagacccgcttcagtgtgattgcctcccttgcttcactgcttttagttccaggcagtttcattgtacatccaagccttcctctgcgtgagagcaaaggctttgctcatcagccagccagtcttgttactatctggctactttttaaggttaaaaaataaaaggcagtttctttgctttgcaggcggcaaggcaggaggcgcaggcctcttcattgttcacatgtcacaggaggaggctctgagcaaaggccactggcaagttagggcaacaccaagaaggctctgcggagagactccctgtgggttggggcctggcaggaacggtgcctgtggactgtttatggtctgtccagttgaggcttggtaaacccaagtaaagtgttaaaaacctcagtacaaaagatcctctaacacatctggaaccaaattatttcttcttaaaaacacagtactaagtgtcacaaagctttccctccaatctactactagaaaacactcatgccatggcccacagacccaagagtcaaggacagagagaaacctgttcttcaaaagaaaaaaaaaaaagacagcagtacataaagtgcttctttttaatgaaacaaatccaagagatgtacagtcaggctcaagttgtgcagttcacaagcatggaggaaacagacagaacgacagcgttcaggacagtcagagctaacccaagacgaggctggacttgccgccagggggatttcttctggatggcactggggccggggccaccgggctgggcacaggcgcagcaggcacgggcttctc

SEQ ID NO: 482161 - DNA, 993 bp, Homo Sapiens
  misc_feature (580)..(580): n is a, c, g, or t
  misc_feature (582)..(582): n is a, c, g, or t
  misc_feature (895)..(895): n is a, c, g, or t
aagcttctttcactacacacttaacatgaaaatataacgaaattttgatacctagcaagctaaaagcctccctgaagtttccacccagaaaatagcatattgaagggaaaagtataaaattactctaatagaagggatgaaacagatcatgacaattaaaaggatgcgcatgtaataattaggtccagacatatcacgagaggatatgaaataactgggggaggggtgattagaaggagtaccgtattgtcggatatccacacagatctgctccacacccgtggtcccgttggtctgcggtgacttgatgacttcacaagttgaccatatgttgtagaacataaacacgggcaccgctgagaaaccaaacacacccagccaggccactccaagcacataggtgaggaaaacgaactaggccaaaacaagaggaaggacaatcatcactgaaacaggtagatgtgtgtccctaagtggaaggattgtgcattttcaggcccaatactgacctgtgaacacattgtgggaccctcgccccggcattggtagcaagaaggaaaagccagcacgggagcagggnangtaagagccagccacattccccagagctagaggatctagaattggagtgcccgaagcaatgtcagggcctttcgggtcactcttaactaacaaggacaggagaccccaagaggtgatctcactcatccaaggtcacagagctaatcagtggcagcctctcaagaggtgctctttctaaatagccgttctgaaaatgcagacatgctacttaacatggatagattctggagtattcatataccactgaattataacttcatattaatttctcaaaagttacctttatttttcgtaacaggttggctcacagagnatagcaattgccacaagaagccctctcaaaaagaactttgctagtttcctgattctgcaaaattaccaaaagtttcaaataatcacgaatacaagctt

SEQ ID NO: 482162 - DNA, 1000 bp, Homo Sapiens; identical to SEQ ID NO: 308832

SEQ ID NO: 482163 - DNA, 1000 bp, Homo Sapiens; identical to SEQ ID NO: 308834

SEQ ID NO: 482164 - DNA, 1000 bp, Homo Sapiens; identical to SEQ ID NO: 308835

SEQ ID NO: 482165 - DNA, 1000 bp, Homo Sapiens; identical to SEQ ID NO: 120005

SEQ ID NO: 482166 - DNA, 1000 bp, Homo Sapiens
aggtgtttgtggaagatgaaaggggtggtactcaggaagcatcgtgagagtagtggctggggaaagggggattactgatcatccaaggcatcagtgtgaagatgtggaacaggaaaacagagctcacatagaggctgcaggccctcagatgcacagaggggcctatggccaccttaaaaaggttgattactctatcctcataaaaccaaaatctggctcctttgcagtcaccctcctgcctaaaagttccagggacctttccagagagtttcatccccagaggaatgttcctgagtatctattacctggatatttctcaggcacaaggaggaaccagctctctactgtcagggccatatatcacaggccctaaagagctggcatgaatctaggatgaacaagggtgtctttgatttgtcaaaacatggggtagctgatgtctaaaatgtacagcccggggtttctagtgtttgttgggtcccaccaccaagggctttcagcacctccagagttccttatgttcctcttacaaacacggggcaggggatgtgaccctcatttcatggtctaatgcgtggatgtagcagtcattctagatcttgtcatgtctgattaagactgccctttttctgggtttcctatgttaggtacacaacttcttccctcttcccctggaattatctaaaagttcccacctctcattgtgtgtctgtgtgggattggagtgtgtgtgcacgcatgcacacgtggctgcatgttggtaatgaaaatatagggatgccagtataaggcttgtgttagggaccaatgaaatggagttggggacagaattaaagaaacaaatctgctgttaagaccaacccatgccacccatcctatcccacctctgatctactgtttgatttactgactttgaaaggttaactttccaaaataagacatttcattttatttctgaaatcagaataagtcggtgagagtagaaaccactaggtcgaga

SEQ ID NO: 482167 - DNA, 1000 bp, Homo Sapiens; identical to SEQ ID NO: 308838

SEQ ID NO: 482168 - DNA, 1000 bp, Homo Sapiens; identical to SEQ ID NO: 308839

SEQ ID NO: 482169 - DNA, 1000 bp, Homo Sapiens; identical to SEQ ID NO: 120006

SEQ ID NO: 482170 - DNA, 1000 bp, Homo Sapiens
tttttttttttttttttttttttcacaagtccacacttggccagtttattaaaggcagggagcttcggcagggtccaaaagggagaagttgggagatgccccctcctcagctccctccttccccaacaactcttctacagcccagcccccagggcccagaggcagggctggcgtcaggcagactgtactgcataaatacgtggaggccacagcccgaatcagcagcgtcagggggcagggaaactgggtttgggatgagaagtgggtggctctgggggcacgtcccccagtgcttgtccagagcccagggacccacagagccagagaggggaccagtgggccagcttggggtctggctacggccagccctgcccagcgaggctggcaggtggctctggttttgggggagaagtggggtggggtgtggccatgccacggcccacggggacagggtggggtcaggtgctgttgccctgctcctgttcaaagagtagcatggccagctgggttcgggagccgaggccctcaagcacgctctggaggcagcggtggtacaggtcctcactgagcctcgcgctgcacgtctgggcccggtagcgctgcagcagcgccggctccaccgcccgcagcacatgcagactggagaagtggaggaacagctcgtacacatccaggctctccagcagctcctcttcttgttctgaggctgccgccaggcgcccacgggctgccacgtagtcggagttgtagaagcaggcctcgctggctgcctggcgatcaaagcggccagtgtcacggcccagctctgggggcccaggcccttgtggtggggccacagctgggtggaaggcttggaaatgcatgggaaagaaggcctgccagccggagatggcatgcatgcggcagcggttcaggaagtcaggcgtgagcaccgtgtctggcccggccagcaggaacagtgtgtccagcgggtgcttcttggagagtagatccatgaggc

SEQ ID NO: 482171 - DNA, 295 bp, Homo Sapiens; identical to SEQ ID NO: 308841

SEQ ID NO: 482172 - DNA, 1000 bp, Homo Sapiens; identical to SEQ ID NO: 308842

SEQ ID NO: 482173 - DNA, 1000 bp, Homo Sapiens; identical to SEQ ID NO: 308843

SEQ ID NO: 482174 - DNA, 1000 bp, Homo Sapiens; identical to SEQ ID NO: 308844

SEQ ID NO: 482175 - DNA, 1000 bp, Homo Sapiens
aaacgaacctttaatagcggctgcaccattgggatgtcctgatccaacatcgaggtcgtaaaccctattgttgatatggactctagaataggattgcgctgttatccctagggtaacttgttccgttggtcaagttattggatcaattgagtatagtagttcgctttgactggtgaagtcttagcatgtactgctcggaggttgggttctgctccgaggtcgccccaaccgaaatttttaatgcaggtttggtagtttaggacctgtgggtttgttaggtactgtttgcattaataaattaaagctccatagggtcttctcgtcttgctgtgttatgcccgcctcttcacgggcaggtcaatttcactggttaaaagtaagagacagctgaaccctcgtggagccattcatacaggtccctatttaaggaacaagtgattatgctacctttgcacggttagggtaccgcggccgttaaacatgtgtcactgggcaggcggtgcctctaatactggtgatgctagaggtgatgtttttggtaaacaggcggggtaagatttgccgagttccttttactttttttaacctttccttatgagcatgcctgtgttgggttgacagtgagggtaataatgaacttgttggttgattgtagatattgggctgttaattgtcagttcagtgttttaatctgacgcaggcttatgcggaggagaatgtcttcatgttacttatactaacattagttcttctatagggtgatagattggtccaattgggtgtgaggagttcagttatatgtttgggattttttaggtagtgggtgttgagcttgaacgctttcttaattggtggctgcttttaggcctactatgggtgttaaattttttactctctctacaaggttttttcctagtgtccaaagagctgttcctctttggactaacagttaaatttacaaggggatttagagggttctgtgggcaaatttaaagttgaa

SEQ ID NO: 482176 - DNA, 1000 bp, Homo Sapiens; identical to SEQ ID NO: 308846

SEQ ID NO: 482177 - DNA, 1000 bp, Homo Sapiens; identical to SEQ ID NO: 308847

SEQ ID NO: 482178 - DNA, 1000 bp, Homo Sapiens
gaattcaattttaaaaaatattttgttaaacattttcatggctatgtttgtgtgtctttagtttccttttcttttaatgtcattgtttgatgttagtatattggacttgtaaattattgggatgtgttttcttctgctcttttgttgaaagagtttgtattgagtttgtattgtttcttccttaaatgtataatagaattaatcatacagacattaaaagtattatgacagtattatgacagaatactatggattaatcaatgaagccatctgacctggaaaccatttggccttctctgtgagaaggatttttaaaattacaaacttaatttcttccattgacagagatttcttcttgatttagttttggtaatttgaatcgttcaagaaatgtttctatttcatgttgttaaaataaaaattttagagaagttgaatttaacagagtttatttagcaaagaacaattcatgaattggggagccctcagaacccagaaagattcagaaagctctgtccagcaacatgtgaaggcagtgtttatagataaaaacaggaagtgatactcaaaaccagccaatttattacagctcagtgtttgccttatatgggcatggcgtgatgaggcatttgcttatgggggacataatatgatcacttggcagcctgtgattggctgagactcagctatttattacaacactcttaagttaggctgtagtttgtttgcataacgcagttatgttaagttgggttagtttgctatgtaggaatttaagatatggagaaagctttacaccaaatttaatttaatttaacaatgtaaattgtcaaatttattgtcatttttgtttattggcattttcatagcattctgtcataatacttttaatgtctgtatgatttgttgtgacgtacccacttccatttctgatattggggatttgagtcttatctctttttcttgatccatctacctagagattcatgaatgtattgag

SEQ ID NO: 482179 - DNA, 1000 bp, Homo Sapiens; identical to SEQ ID NO: 308848

SEQ ID NO: 482180 - DNA, 1000 bp, Homo Sapiens; identical to SEQ ID NO: 308849

SEQ ID NO: 482181 - DNA, 1000 bp, Homo Sapiens
tttattaaaaggtgatcacctggctcagtaggactagcgtccaggaaagtctgagccctggataaagaaagcagccaccttttaagcagtcggtggccgggagtacgcgaggcaggaagcgtacttacagaagcgagagcaaaggcagttgttcagtcttttacatttatctatactacatgttccacatccctgggaaaccatgtttctgcatcaaccttgtaactttgcagctgcgctagggtggtgaagcaggaactcgctgagcctcaaggaatgtgaaactagcaagtacagataaggcttgctgagcacagaaggaaaaacaggcagttagtgttcttctttaacttagactatgggggagctacactacacttagcttttgaaggaaaaagtaaaaatttttggttgtctttgattatacttgtaaaattcatgaattccttcttcaacacaacccccaggaatgtcaggcgaccatcaggtgatggtcaggtggctgctgattgtctctctaaaataataattggtcacagctggcaccagggaacgacagtctcccaatagatagaaaaaacctgaaactggtgatcggcagcttccccataaaatgtcaggagttgggcgagtgggctcaaacatgcgcactaagagacaaaatggagcattcccctggtaagggaagaacctcgagtgagcgcgtgcacaactccagtaaacacactgcgcatgctcccctccccagcgctagcaggccactactgcgcatgcggacagcccaccccaagggaagaaagggaagaatcgtggggagaagcaacgcaagaccccggaagcatgccaacgtgtaaaaccccaagtcaaaggtcaaacagtgcactggatctctcaagtcgcctgcttggccctctactaagtatgttttacgttctttcattcctgctttaaagcttttcagtaaactttcatgcctgctctaaaacttgcctcagtctct

SEQ ID NO: 482182 - DNA, 1000 bp, Homo Sapiens
cgttgcgaaaagcgccggccggggcgaggacgagggcgagcacggcgcagaggagcggcagccccctctccattctcccttctccgggtccgcaggcagacgcgggagaacgaggacgtggggggaaatgcagcaaagaggagaatctaagcgatccgaagagccccaactccgcctagagctgtacaatcctcagcccgtcttggagaaaagaaagcagcgaggcaatgcctggatccgagaggaacgcttctctttttgtgtctcaagtcgcctgcatcctgtcatttagctccggcttcctctcccttttcccacacttgttcctcttccaggagccactgcccgggccatgtctcaaaaaaaaaaaaaaaaaaaaaaaaggccgggggggggctgtgggtgggagggggaggagggaggtagggcaacacacaccaaagccaatttccaggaagaaaaaaaaaaaatccggcttgtttctggacccgttggagccgcggagctggcgcccaggggaggtccgggtgtctgcgggaaggaggggaacgagcaatgaaaagatgagcgggagacagaggagtttcaccaactgcacccccgcctcccctcctgcggcctccccccactccggagcccttccctcgcttcctcccgcccctctccccgcttgggctcgcctgtaattgcctgacaggagactgggaggaacaactttccctccgagtgctctccccgtccgtctgtctgtctttcccagagaccctgcagggatctccgcgggaaggaaggcgctgggagtctgcgccccggtcgcgtgggtgcgggcgtcggaggaaggggcgcggaggtcagtgccagccgcagggtctggccagcccacctcgcgtgctcgctctgcacccctagagggagagctgggcagctcctgcaggcgcagatcccgccgccgcgcagtgcggagcgcccgggaggtggcggctgcttctcgcaacttcaa

SEQ ID NO: 482183 - DNA, 1000 bp, Homo Sapiens; identical to SEQ ID NO: 308850

SEQ ID NO: 482184 - DNA, 1000 bp, Homo Sapiens
aagcttaccctactcatcctaattatatggcaacaagaagagggccagaaaataagtaaacagactatcaagtttaacctcagccagtcgcttcacatctgagcctcactctcgactacaaaatggggctacacctgtatctcataggtctgactcaaagattaaagagcatgaggcagagctgttagcatagcccagggcttagcagacttgccactaacaaagaacctcagctgtaactttctcaaattctgcaacctctgctcaaataccagcccactacccctgaccattctaagatgtctcttaagtttcctctggaagaggacaccgcttttagaataaaaattacccgtctacaacctagaatgaatgacttcagcaataatgaaagtaaatggctggtaactggctaaatggacaaatggtattttatcctgaataaaagtctgtcagagatgacttttgtctagttgagggtctgaatcctgactctgctgctcattaaatgtacacataaccttcaacaagtttcatctgtgcctgattcctcatccatgagtgtgatacatatattacacaaacatctcaacacttgagagataatacacaaaaaacctcaagaacttaacagcgatacttttttgactaagggaatggacaaagcaattagtctccaatttactttattcctgtccaacaatacagccaggtctgtgaaagcaaattcaaggtgcaaacatgaatttgttaccagttccatattctaacaaataacttcttgccatttcacttagagaaacgtggggttctctgcatctccaaactaaaggaatcaggaaagaccccattgtctttgtttgcaggtctacttaggagcaaagtgtcatctaccttacaaatggacaactgtgtacacattcacagagacactctctgacatgagtctattaatttgctaattttatagaagttgcaaatgcagatggaagtagagagg

SEQ ID NO: 482185 - DNA, 1000 bp, Homo Sapiens; identical to SEQ ID NO: 308851

SEQ ID NO: 482186 - DNA, 1000 bp, Homo Sapiens
catcgtgatgtcttatttaaggggaacgtgtgggctatttaggctttatgaccctgaagtaggaaccagatgtcggatacagttcactttagctacccccaagtgttatgggcccggagcgaggagagtagcactcttgtgcgggatattgatttcacggaggatggtggtcaagggacccctatctgaggggggtcatccatgggggcgagaaaggatttgactgtaatgtgctatgtacggtaaatggctttatgtgctatgtactgttaagggtgggtaggtttgttggtatcctaatgggtgaggggtgactttggagttgcagttgatgtgtgatagttgagggttgattgctgtacttgcttgtaagcatggggagggggttttgatgtggatggggtttttatgtactacaggtagtcaagtatttatggtaccgtacaatattcatggtggctggcagtaatgtacgaaatacatagcggttgttgatgggtgagtcaatacttgggtggtacccaaatctgcttccccatgaaagaacagagaatagtttaaattagaatcttagctttgggtgctaatggtggagttaaagactttttctctgatttgtccttggaaaaaggttttcatctccggtttacaagactggtgtattagtttatactacaaggacaggcccatttgagtattttgttttcaattagggagatagttggtattaggattaggattgttgtgaagtatagtacggatgctacttgtccaatgatggtaaaagggtagcttactggttgtcctccgattcaggttagaatgaggaggtctgcggctaggagtcaataaagtgattggcttagtgggcgaaatattatgctttgttgtttggatatatggaggatggggattattgctaggatgaggatggatagtaatagggcaaggacgcctcctagcttgttagggacggatcggagaattgtgtaggcgaata

SEQ ID NO: 482187 - DNA, 1000 bp, Homo Sapiens
catcgtgatgtcttatttaaggggaacgtgtgggctatttaggctttatgaccctgaagtaggaaccagatgtcggatacagttcactttagctacccccaagtgttatgggcccggagcgaggagagtagcactcttgtgcgggatattgatttcacggaggatggtggtcaagggacccctatctgaggggggtcacccatggggacgagaagggatttgactgtaatgtgctatgtacggtaaatggctttatgcactatgtactgttaagggtgagtaggtttgttggtattctagtgggtgaggggtggctttggggttgcagttgatgtgtgatagttgagggttgattgctgtacttgcttgtaagcatggggagggggttttgatgtggattgggtttttatgtactacaggtggtcaagtatttatggtaccgtacaatattcatggtggctggcagtaatgtacgaaatacatagcggttgttgatgggtgagtcaatacttgggtggtacccaaatctgcttccccatgaaagaacagagaatagtttaaattagaatcttagctttgggtgctaatggtggagttaaagactttttctctgatttgtccttggaaaaaggttttcatctccggtttacaagactggtgtattagtttatactacaaggacagggccatttgagtattttgttttcaattagggagatagttggtattaggattaggattgttgtgaagtatagtacggatgctacttgtccaatgatggtaaaagggtagcttactggttgtcctccgattcaggttagaatgaggaggtctgcggctaggagtcaataaagtgattggcttagtgggcgaaatattatgctttgttgtttggatatatggaggatggggattattgctaggatgaggatggatagtaatagggcaaggacgcctcctagcttgttagggacggatcggagaattgtgtaggcgaata

SEQ ID NO: 482188 - DNA, 974 bp, Homo Sapiens
gataaaatttgaaatctggttaggctggtgttagggttctttgtttttggggtttggcagagatgtgtttaagtgctgtggccagaagcggggggagggggggtttggtgaaaattttttgttatgatgtctgtgtggaaagcggctgtgcagacattcaattattattattatgtcctacaagcattaattaattaacacactttagtaagtatgttcgcctgtaatattgaacgtaggtgcgataaataataggatgaggcaggaatcaaagacagatactgcgacatagggtgctccggctccagcgtctcgcaatgctatcgcgtgcacaccccccagacgaaaataccaaatgcatggagagctcccgtgagtggttaatagggtgatagacctgtgatccatcgtgatgtcttatttaaggggaacgtgtgggctatttaggctttatgaccctgaagtaggaaccagatgtcggatacagttcactttagctacccccaagtgttatgggcccggagcgaggagagtagcactcttgtgcgggatattgatttcacggaggatggtggtcaagggacccctatctgaggggggtcatccatgggggcgagaagggatttgactgtaatgtgctatgtacggtaaatggctttatgtactatgtactgttaagggtgggtaggtttgttggtatcctagtgggtgagaggtggctttggagttgcagttgatgtgtgatagttgagagttgattgctgtacttgcttgtaagcatgaggagggggttttgatgtgggttgggtttttatgtactacaggtggttaagtatttatggtaccgtgcaatattcatggtggctggcagtaatgtacgaaatacatagcggttgttgatgggtaagtcaatacttgggtggtacccaaatctgcttccccatgaaagaacagagaatagtttaaattagaat

SEQ ID NO: 482189 - DNA, 976 bp, Homo Sapiens
aagataaaatttgaaatctggttaggctggtgttagggttctttgtttttggggtttggcagagatgtgtttaagtgctgtggccagaagcggggggaggggggggtttggtggaaattttttgttatgatgtctgtgtggaaagcggctgtgcagacattcaattgttattattatgtcctacaagcattaattaattaacacactttagtaagtatgttcgcctgtaatattgaacgtaggtgcgataaataataggatgaggcaggaatcaaagacagatactgcgacatagggtgctccggctccagcgtctcgcaatgctatcgcgtgcacaccccccagacgaaaataccaaatgcatggagagctcccgtgagtggttaatagggtgatagacctgtgatccatcgtgatgtcttatttaaggggaacgtgtgggctatttaggctttatggccctgaagtaggaaccagatgtcggatacagttcactttagctacccccaagtgttatgggcccggagcgaggagagtagcactcttgtgcgggatattgatttcacggaggatggtggtcaagggacccctatctgaggggggtcatccatggggacgagaagggatttgactgtaatgtgctatgtacggtaaatggctttatgtactatgtactgttaaagatgggtaggtttgttggtatcctagtgggtgaggggtggctttggagttgcagttgatgtgtgatagttgagggttgattgctgtacttgcttgtaagcatggggaaggggttttgatgtggattgggtttttatgtactacaggtggtcaagtatttatggtaccgtgcaatattcatggtggctggcagtaatgtacgaaatacatagcggttgttgatgggtgagtcaatacttgggtggtacccaaatctgcttccccatgaaagaacagagaatagtttaaattagaa

SEQ ID NO: 482190 - DNA, 1000 bp, Homo Sapiens
tttttttttttttttttttttttttttttttttttttttacatttttgccttcttattttaataggatcatgtctctcactttacaaattctcaaaacatatggttccctttttacatacatatataaacacttttaaacataaatatcaaatgcatgagaatcatatgggcagataaatttaggaagccaagaacacagaacgaaaagccagtcaccagatcttacaaataatcatctaaacttctctggccattcaatttgatacattatcccaaatattccatgtcacatggtccacaaggttttcttttgggattctgaagcaatcaatagccatacttgtcattaagatgggttctgccatctccactttgaccttcaggtgggacccacacacagtagtctgggtcatcttcaggatatttggaagaaagtgttggtggaagtttgcctggaccaggtgttttctttttcttcaattcacctctgcttttctcatattcattctttgatgctgagggtcctgcgcacaatgaagtggttttgctacagtcttgataatctttattctgttcttcctcgctaagttgagacatgttttcatgggtttgggtttctttaaaatgtgtgagatctgtgggaggcctcatttcctgcactgctgcttctggctctatctctggctgtggcctactgaggcttccatcctccagttttttcttttcatgctcctccttttctttctcttcttcctcttcctcttcctcctcctcttctacttcaggctcatctttcattctcattagagttggagggagttctggacgcttggggggtaacttccctactgttccagtttttaatttgaatttgcttcctcctttcatggcaccaaatagaggcaatgtaagctttttagctttgttttctgcacctgtagtctgagtttcagtcttttttagttctggaatctctgctggctttacaatttttattaa

SEQ ID NO: 482191 - DNA, 1000 bp, Homo Sapiens
gaattcaaccccaggcttcccaatgctcacaaaatatggtggccaactgggagtgtgtgtacattaaggaggtggtaataatagaattgctaagccttacatggtttaaccttcacactttaggcaccccccaaaaaatggtgcctaatttattgcagaaaataataacttgtttatgttaaatgttagcttttagaagacttaacaaaggatgaatgcttctgttaaggcaccaaacaggagggagattttgctacaccttttattattttaaatatagatcaatgaattacatcaaaactacaagcaacaattagtataaataatactttaatcagtggcagcaaaacattggtcaattctattaaaaaagcatctcgtgtgaacagacatcatgggctgactgacagtgtcatctcccaacaaaaggctgcgatggacaaagtgagatgggagtcagaggagcaatgtcctcagcaaacacttcactctccccctcccccagtcaggaccccaacacggtttttgtttttgtttttaaaacaccaacacaaacacttctggctcatatttaaaggaacaaactggaaacaaataatagcaaatgggcattggagcttttccacacctagctttctccaaagcacgttctcagatggaaacccatttccttccctgccctaagtggttacggggccctaccccttccctggcccactcctgtgggcccaaatggatgctggggtccgactgggacctcagggttgggggctgcactctgggccatccaggctccattaacatttcaaaagaatccctccaagctgagaaggagagctgagacttataaacaaagaagttgtttctctgattaagttactttccaaagtagtggggctatgtttgagaaggagcttgggttttcctcatgaaaacatgtttcttggctttcctctggggcagggatgcagtcagttaagcctgtgtggcatttggtatg

SEQ ID NO: 482192 - DNA, 1000 bp, Homo Sapiens
tatggacatattgtcagtggctgcttttgtactacaaggacagagttgagttgttgcaacagaggctatggtgttgcaacagttaaggcctacagtattcactgtttggtcctttaagaaaaagtttggcagcttgaacttttccaccatttgacagcaaatcagtgcttctgtgagttgtacaaaaggttgcaggctgcatctaggatcaccaataagctactggctgttaatgagagacagggcctgagtgaaaaggagaggtcagggtgagcttctggagagtgggaaagattctgtgcttggccaagctttaatcagtcaggcccctgagtcctctcctaggcccatctgtgcacttccttttaaaatccagttctgggccgggcgtggtggctcacacctgtaatcccagcactttgggaggccaaggcgggagaatcacctgaggtcgggagttcaagaccagcctgaccaacatagagaaacaccatctctactaaaaatacaaaattagctgggcgtggtggcgcatgcctgtaatcccagctactcaggaggctgaggcaggagaatcacttgaactcaggaggcggaggttgcagtgagccagatcgcgccattgcactccagcctgggcaacaagagcaaaactccatctcaaaataaataaataaataaaatccagttctaacaagaactctgctaagtcagcttagcaacaaccctccccccaccactccatatctgatcacctcccatatctgatcacctcctatatctgatcacgttcctcatctgccaccatccccccggtgatgtctgagcaccctggcctgcctccagtatgaatcctgttaggtcagtgtagaaaatgaccgagaacccatccccagcagtcagtttagccagaattccccttcccctgatgtttcctcttggtaattttccagctgcagatatccaaccctgttccctggctatcagctcccacttgccc

SEQ ID NO: 482193 - DNA, 1000 bp, Homo Sapiens; identical to SEQ ID NO: 120007

SEQ ID NO: 482194 - DNA, 1000 bp, Homo Sapiens
tcttgagaaggtacgattattaagtttctattgtgaagtcaaatagaacaattcactcaaaggacacgatgtttgattgagaacattcttaattttattttctttaattttataaaatacactttgtaagataagtttctaaaagtttatcctttatgtgtgttaaaattgcaattctatatcagaaatgaaggaaacactttcagttgattaactctctttgtgtgtgtatatatgtgtatgtatgcatgtgaggttttcagggaagggttggttatttgttatgttattaaatcaaaacaaaacacaaggtacggattacttcactgtcctttatcttgattggtttcttacaaaacattttccctctcctccttctatgcagcctggaagcttatcttgtatactggtttgaaaacaagtatcaagtgtctttttgtaaagctcttacatctccttaaatattgctgaaaccactttgggggaaaagaacaacacaactctttacaacaaaagaactgtagtacaaatctttccttcaattaaaaccaatcagactttttttttttttaacccaaagttaacaaaaacaggaaaagactgaaatctgggagctattcaggtctcaaactctttctgcctgtcctttttcctggaagcttaccaactgaatagctgatgactggtgcattctgttatgtgatctatatcaggagaaaataacctttatgttaaacctaactcttaacacaccaagataacattgctaagtaaaatcattttccattagctagaaagaacgatcagattactcaaattgagattcaaattcaccaaatctgtttctgcaaaggcagaatacttgtagaaaatcccaatagattcaactagccaatttttaatatcatttgtgatgcttaatgtccaattttcctagtttaaaaaacagtcataatcaaagaattattctccagacatttctgatgcaaccccaaataag

SEQ ID NO: 482195 - DNA, 1000 bp, Homo Sapiens
ttttttttgtttttgttttcagtagcaagatgcagaagaaacaaataactgtctaacattaacttattgtaaggagttgtattactgcaaaattactaggtgtaaagttatggtataagcctactcaaaaaatgggttaatataattcaccatctacttaaaatattactaacaagatattggtgaatcatgtgctaaagatactgaaggcccttccaaaactgagatctatgtttgttcaatataccaggtcatataaaactagactagtttactttcttattccaactgttttatgagtgatcttatcataagaaaagtacacattacctctcttaattcccttgcatcatcagatatagatactatttgggacaaaaaataaatgttttattaggagtgtaaaattaagaatctttatagatcttttggaaacagtatattgaaaaggactcaataagtactaagccactgtataaccagaacaataaacaaattcattcaactaggaacagtgttactgttatctactgggtttttaaaacttgtaactttgctctacagctatgaaagtttattaatacactaaagtccatggaatgaatcaagtgtagttcattcaagctcytcagtttctttggtaaataggtctgccaggtcagccacagtcaagacagaggcctctgaatgctttgctgatgagttcgtgtgacttctctcagcagttttcagcattgcctgcattctttcttctattgttgctttaattaagaatctgtgtacaatagtaggttttgtctgtccaattcggtgcaccctccctatggcctgaagctcatgggcagggttcaatatgggctccaccaagagaacatgagttgcttcaatgatagttaatccattagaacctgtgtgcaggggcagcagcaaaatattgatttggggatcacgtttaaatgctgaaaggttctcctgaaatgtcttaacacgactgatttgt

SEQ ID NO: 482196 - DNA, 1000 bp, Homo Sapiens; identical to SEQ ID NO: 308856

SEQ ID NO: 482197 - DNA, 729 bp, Homo Sapiens
ctcccgtggggcctgcatggctgaagcttcttgtcggatgctggaggccacggaggctgctgccgcccgcgtcgaggggcgctcagcagtgaggctctccctgcggtttctctgccgccagcccggccggatctgctcagctccgtccacgggcttttcatccttttgcacctccccgaccccgccgccgcgaaccttcccgcaccttcccgcccagtcgagagcctcccgcccgcccgcccgggctgagtcagccgggcggcgcagcgcggcgctgaccccgggagaaggttcgggcggatcggtccgtgagaccgaagaaggctgggcggctacttgcaaggccagcccgcctctgactcagggctgctgaaagaaacgcggggaaggttctagctcctcccggctggctctgaggacgcgcggttgtggcagagctgcaaaagcagcaactttagaggcaaggtctccccggggctgtggaggatccctgaggcgagcacgggcctgcgggctgccttggagggccgctgagagcccagcggcaggaagaccgaagatatgttaccatgcgaatacagatatataagatatatatacatatatcttaaaacagttttatcttgaacaaaatattttccaaaccacggttttaagacagttgcctgtttccttaaggaatggcagagattaattcagctttaagagtgacactgcagctcttcacgc

SEQ ID NO: 482198 - DNA, 1000 bp, Homo Sapiens; identical to SEQ ID NO: 308859

SEQ ID NO: 482199 - DNA, 1000 bp, Homo Sapiens
gatcatgcactccagcctgtgtgacagagggagactctgtctctaataaataaaaatatagaccttgtctctagtagactctgtgtctagtagaccttgtctctaataaataaaattaaaggcccctgaaccacccctgaggttgtgcatcttccattccctgcgctctactctgttaactcctgtccatcctgtgggactagttcaaataccacttccatctaggaagccctcccttgacagcctaaatgtgttcgggtcccctggttcgtacccttataattcctgcgccaccagccccagccacctccctgcccgcgcctcctccctctcccccacactctgtctcagccatacagcctccttgttgttcttagaatgtggcaggtcagtgcctgcctctaggccctcgctcttgctctgcctcgagcactctccctccgaatccacccatcgctgcctccccactccctccagaccttggctcagtgtcagctcctgagagagcccctctctgacctcggccctgcagccccagcccctgtgctcggcattgctactctttgtggcttctgcctctgcctagtgttgcgtggtgtgtttatttgttgatgtcttccttgttggggcccaccagagggtgagcccaggaaggcagaagccatcggtatttgggtcactgctgtgtccccagaacctagaacagtgcctgctcccccacgggcacccagtaagcatctgtggagcagatgacagctgcaggcactgagcaggcatccatggtcctctccgcaggtcagattcagaggaagagcggtggcagcgctcagggatgcgaagccggagccccccgcggcccaagtggcactcaagagatgggtcctctcagtcggactcaggagaggagcagtcacggggccagtgggctcgccggcgacggcgcgcacgctcgtggtctcctagctcctcagcatccagctccgcgtctccagggcgatcc

SEQ ID NO: 482200 - DNA, 1000 bp, Homo Sapiens
ccagtctgagcaacaagagcaaaactttgtctcaaaaaatatatataaaaaataaaataacaaaaaatgagacagaaaactgaaatattttaagtttcactattgcttgttagttgattaaagtagttctgcttccactttatttttaaagacactaattgctacactgaataaaaccttaatggagtttcattataagtatctattatcatttgataattttctacatagaagcatgcaaaaagtttaaaattcagtttcatttgacttagccttgactgtaatgaaggactctatgaagaggggacacagtgtttatgggctggagtccctgtaactgcttggtggccgagtcccagtcattccccagttcaagccatgggcagatagatgggtactgtccttcagttcttcttacccattcacttgctttctttattgcttcaaaagcccagggaatattcttagattaaaaaaaataaatgtttcagatttcagaacataacatgtgaaatgtaatgtggtactaaacccatcacattatatcagacaaaatgattctgccaaaaattaagatatttaataaaagcagttttccttgacatcttacagaagttcttctacttgtctgatgttgagcttatgcactgcattgtcaaatgtcctgtgccctccattcgtggtttccacatgcctccaggcatccctgctgcctacaggacagctaaggttccagcctctctatagttgtttatggttgtccccttgccactcttctcagtttaaatcctatccattcttcacgcacaaactcaagtagtatttcacaaacgagacttctgtttctctctccttcctactgtactgacttgattaggtaccttcagaatatctgacagtcccccatgaaactggcatatgttcagctgtgtctcataagccaggaaaaacttggtagactaagcatatcgagtcaagtctgtgtccactaaatgttgtc

SEQ ID NO: 482201 - DNA, 1000 bp, Homo Sapiens
tacagcagtttgtataactgatattaattcagcattattattgtttttagatttatttcctgacaaaaatcaaagatacaagagaacaggagctgtattttttatattcatgtttacatccttaaggcaacatataacctggtatagaaaattgatttttctataacttgaataaaattatgataggtaacttgattaaatcatctattttgaaatcaggttgtacagtcaggcttgactttttatcttaaaaaataaccaaacacaagaaattttgtatagtaaaaatttaatgaaaaaggaaattaatatattggctaaatatgaagaacatatttgttatattaaccacaatgtaaaggtacacatgatattacataaaaaataatttaaataataaaaatagttaaataaataaatatttaaataaatagatgaaaggagacatcagcatggtcatctgtaaaggactagtgcctgcacaggtatacatgatgcttctttacactcctgaaaacatttgaaaattttgattcaacttgtggtggttataggagaagtgagtctttgaaatggaagaactcatgaaagtgtgagatgatgtattagtcaatgagaatcatttccatgatgaaccacttttcaatccttcctccttaatcttttttgcaagtttgttgaaaaagagagggatctcatgatttctgctctgacaacctcccaggcacaagggctgtatttcttctccatcagataaagagtgattctttggaagtatttcttcacagccaggatggagtcctcattcatcaggggagtctcttccaccccaacctcctgtatcacacaggcttccaggtcattcatttgctggaaaagttcaatgtagaatttttctaggagggtctcatcccaagcagcagatgagttctttgtgctgaagagattgaaggtctgctgcatcatctcatggaggacagagatggcttgagctttctgg

SEQ ID NO: 482202 - DNA, 1000 bp, Homo Sapiens
gaattctgtatgaacaaggcagtggggactggaagcaggcttagttttttgaaaaactagggagaaaactaaccagatggctagggtataaaaaggttcttcttcctctgatgcctgtgccatgccagcagacagggacccacagctcccctaagatacccacacatcttggctgtcccatgatgagcagaataaagagattgctgcttaatagtgtcatggaagtaaatgggacttctcacccttaagcttgcagggatggtggggggcacataattatttaaaaatctttcgaggagcaaagtgatcccccaaataactggggaaggttagggagaacacaaaagctgacatattcctctggctattcctgatggccagctcaattctaactttatgatgagagaatctggaacacacagtaggaggaatgggaaccccaggtttagttccagaccctccagctttccttttctcttttaatcccacagcagttcatgccatatttattcccccataaggttcaggtccccttattgtctcttaccttatatattccatcatggctttcttgaattttaaattccttaaaggcaggggccagaaagtatactactttgcaggtatattttaaaaagaacaactaataggtacttggcaattttataatatggatggttatataaatcaaatcgaaattaaaactgccatgttgacttttgcaccaaaaataatttattttccaaaataaaatttaaataaataaaaataactcataatttaataaaaatttcaaaatcttctagtgtcctttcatatgcagtacattagccatcagtcacttaaacagcatctgctggttgaagaatgcttgaagcaattgtccagtcccagaggcacaggctaggagatcttcagtttcggaggtaacctgtaagtctgttaatgaagtaaaagttccttaggatttccactctgactatggtccaggcacagtgac

SEQ ID NO: 482203 - DNA, 1000 bp, Homo Sapiens; identical to SEQ ID NO: 308861

SEQ ID NO: 482204 - DNA, 1000 bp, Homo Sapiens
gatcacaaggtcaggagattgagaccatcctggctaacacagtgaaaccccgtctctactaaaaatacaaaaaaattagccgggcgtggtggcgggcgcctgtagtctcagctactcgggaggctgaggcaggagaatggtgtgaacctgggaggtggagcttgcagtgagccgagatcacgccactgcactccagcctgggcgacagagcgagactccgtctcgaaaaaaaaaaaaatggggaaggaaccatctaggagggaacacaatgagggacgggcccccagctgcagatgtgacagtggtatcagtctgggcatcctcagagggccagtaggtgggcagggctggctgggggcatgtcctgctttatagaagcgcatgtcacaacccccataactgctgctgccctgcccccaggtgacacgcccttcacctcaccaccagaggtggacagctgccaggggatagacagtaacctaccagggtccctagctcaaggcatgggcagtgtggccctgcagatgagggcacacctggctgctcacgacaggtgacgccatgccaccctccacagtgtactgcagtggaggtggcccatgctgggctgaggggtccctggtggggcagggacttcctgtctggggctctccctgccaagctgaagacatggaaatcctctggggtggacgggtgcagctgacgcctcgtccctactgcagaggaagttcggtgtggtcctggatgagatcaagccctcctcggcccctgagctccaggccgtgcgcatgtttgctgactacctcgcccacgagagtcggaggtgaggccccagagaatgggttggcctgaggcgcggggccatcttcaaggcctgttggttatgaacctgggtgggtgggggcatggcgtgcagcgcacagcatccctcagattaggcgcctctcccctctgctcccctgctgctttgtgcctcagtttccctcacctgcacagcagt

SEQ ID NO: 482205 - DNA, 1000 bp, Homo Sapiens
tatgtaactaacctgcacattgtgcacatgtaccctagaacttaaagtataattaaaaaaaaaaaaaagaaaatagcattgtcatcactgccaggtttttgggagaatatattttattatcaaatgtacagtatattgaccctaaaattacagtaaagcagtcatggaaataacagatcttgtattattcatggacacagactaactcatggttgcggaagaagcagccaccttagaccagatggacaagtcagatactgcagagaagtttctgggctttccagggaagactctagattcaattctggaaagatatgatgcagttttctcctcctctcctctcacctccgctgagcacagctttcaacaaaaactttgcatacaaggaaatctaatatcacagccttccccagtgcagggttgctggagaaagtaacataacagtagcgactgaatttgaaggaggttggagaggaattgtttaaaattctatttccatgtctgctgtaatgtatccaagtcttgtaaagaccaatcatttattaattttaatgagacagaaagtatttctccttctagtctcatcatctgatttgaaaggaaaaatatttatataaaaaaattacataaaaagtgggttccaggaagaaatgtttttttcatataaaatggtagctgtatgtatgtaactctgaattaaaatatatatattatatataaattatatatatataaatttaatttatatatatataatttatatatataacaatcactctagttctaaatccttattgggcaagctggagttttgaagtgatagaggaaataactgaaagatgacttgtcaatctggaacaaagtctatcatgtaaaaactgcagcaggttaactagacgatgcatcttcaatgggggagtgaggtgttgttcatgtctatggcttattttcggtgaatgttcctcagatatcctatggacacttacgcaggcagtcgaat

SEQ ID NO: 482206 - DNA, 1000 bp, Homo Sapiens
agtaaaatcagactaaaaaatgcagtgttctcagttcaagacaactttcttattgttaataaaagaatttattaataaaatggattatagaaagcagcagctattttgtgcagctgttggagccttgacaataaaaagctatgatttccaactatctctaatcattccaaataattaaatagttatacacttaaatatatatttaattaaagtttaggagaactagttttaaaatatatggtctccttaaattacttttttttccttcttttttttgagcatgacaataattgtaaatttaggcaacactataactagtctctagttagacctgctgaaacaggacagatgatgaggtaagagatgatttctagttatactaaaattctttagatatctaggctctaggggattgggacccatggagggtctgtgcatatgaactcaacagcttctcccagatgtctaatcattttcatcaattttattgttgaaaattattagatcaaagtagtatgcatatattccctctaagatctcagactccctttgcaggtgctgaagaggttcattccacatgatgagggattgaaggtgaagtgagcataggggaaagaaaaagcatgcggaagtcagttgaatttattacatttctgtgtttgtttttgcaccgttgccagaattagccaaagtcaaacctcaatgtattacatataagtatgaaacaaaatctgtttcatgacaaaggagacatttttccctatgatggcaaatttgtacaacaaacactggccatagaaactgctcaatgtgcattactggttatctccaggatatgggaagtatagtatggaggaaggggacaaagcagaaaaagaatgtacattcttcagcaaacacatttcaaacccccaggcctatctgtgtttatcccagaactaatcaggataagtccatgagaggtaccggttaccagtggcttttataacccaagctattc

SEQ ID NO: 482207 - DNA, 1000 bp, Homo Sapiens
cggtggtcagtcatcagaataactcctaggacctcttgggggagaggtgaccctccttctataggacccatctgggcacaagccacatctctgagccttacctgagcaggctggacacctgaggagtgatcaacaccaccagcttcctcgtcagcctgtgtctcctcagtgactgccccaggaccagggcgccctggcagtagatgtcatctgtggccagtgtgacaaaagcctgatcagtcactgtgaaaatcaacagaaacaccagagttacactcctgagggacagcaggggtgacaaggccatagtcacctcctctcctctcccaagattcatggcttgggccagatgtggtggctcacacctgtcatcccagcactttgggaggctgaggtgggtgaattgcttgacctaagaagttcgagactagcctgggccacatggtgaaactctgtctctatgaaaaatacaaaaattagctgggcatggtggcatacctgtagttacagctacttgggaggctgaggtaggaggatacttgagcctgggagtttgaggctgcagtgagctgtgattgtaccactctactccagcctgggtgacagagtgagaccctgtctcaaaaaagaaaaaaaaaaatcacgacttgcagtgaatattcagtattctaattcacaaacattcttcctttcattctaaacaaaacaaaacacaggaggagaatgaaggaaccttaaacatgagacaaagtcaacccaatggctatgcccgtttcctgatgctgcaatgccatggaaactcatagctactatcccttattttatgttgtgtttgactcttgaaaactcacccaaagtgtttagatcttaggtggaaacaaaaggcaaaaagtggaagtgatgacttgatgacctgagttacagcaaagatgtaatccaactcaaagaactgtgttctgggctagatgcagtggctcatgcctgtaatcccagtgctagg

SEQ ID NO: 482208 - DNA, 1000 bp, Homo Sapiens; identical to SEQ ID NO: 308865

SEQ ID NO: 482209 - DNA, 1000 bp, Homo Sapiens; identical to SEQ ID NO: 308867

SEQ ID NO: 482210 - DNA, 1000 bp, Homo Sapiens
gatccaggccaccctgagaaacagctttttcccacagcctcctctgtagtgacacatcagtgttcctcattatcaagcttcaggagagggcagcaacctggacagcgcccattccatcagactccccctggagatggaggtcactgagatcagaataagtttcacagatggtccaatgggacggatgggtcccaggattcaaacccctggctccagcagcttaagctgccattactgcacaggaaccccaggtgatactggaaattaaaagaagcgtggacctccttctgagcactggaggcagcctctctcttctctctaatccaggcctcccctcttcctgtagcatgactgtgatagacatctcaggaaaggttctaacccagtatttttctcaaccccttagttgtagagtgggagacctattatttatacatgccttcttaagtatgtctgaaagtctcactcctttattaggtagaaatatttttaatcacacgggggccaacatccttacagccccaggataaacactttgtctcccccagtggaagcgaatattaatccagaagcgtgggccgttcaaggaagaataggttgagtcctcctcaaaccctgtaacagcccctgcaacaccccaatattaggagtgcaaaaactcagtggggcatggacgctagttcaggacctctgcctcattaataaggccacagtcgcaattcatcctgtggtccctaatccctatatcttgctaactcaaatacctgagggaactaaattgttcacaatcctagatataaaggatggctttttctgtataccattacatcctcactctcaatacttgtttgcctttgaagatccctctggccagaccacccagttaacatggatggtgctgcctcagggattttgagacagtcctcacttcttttgacaggcgttgtcaaaggacctctctgagttttcccatcctcaggccaggctcttgcaatatatg

SEQ ID NO: 482211 - DNA, 1000 bp, Homo Sapiens; identical to SEQ ID NO: 308869

SEQ ID NO: 482212 - DNA, 1000 bp, Homo Sapiens
ctagaacttcactataaaactgatcccacttcttcatgtcaaatatttcgaaccaaaagtcaaagtaaagcacatagatcatattttttaccctctccatgaaagtcatttgatcagttaattctgacataacaacaggtacgtaggaaggagggaaaataaatcctccactatgcttttcaaaagtgtagccaggagagaagctgagactgtacacaaagggtatgttaaatagctcagccagcagctcactacagggaaaaatagcatctgcaaaaatgacgtcaaatcttgactcttgtacttttttcataaatttcttatttgaaactacatctttacagaactttctagttatgtcaccaaatattgacatgatttcctgtacttgtgaaaaatataaccaaaatgtatcttttggaaggtctgaccatctcttaatctgttgcatgatgaaattctccaactcagttttagttaaagatgtgggataaatttcaattttaagagcggatgagttgttgggatcaaaaagaatggaagctgaagatgccagtacagtcacctcatgacctctctgaataagctcatccaggattgtctttatattcatccaatggctgtattctgctgcccacaccagcacctttccacaattcccagagctaaagcaaaagctcagttgtattagcaaaattactgaagtccatttcacagacatcctggtgcaatgcaatgcttgttttccagttgctgttcctttctgtcatttctcatggttatgtccaaagataaattagccaagaagttaaaatgtaacccttataagtcaaagtacatacaatatcattaaatcaacagtctgagcatgtggatggcaaagagacaaatgaaggtaaatgatctgttcacacagatgtgattaatttcccttttatgtttatgagtgctatccttcagctaatatcaaggatcttgtatggacatgccatctgtctta

SEQ ID NO: 482213 - DNA, 1000 bp, Homo Sapiens
ccacaacaatagcatttcctctcctccctggttccaggcctttaagaagtggcaccaacgcctggcagccaggagcccaaggagaggagctgccagtagcccaagaccctggagcaagccaggccccaagggccccgagagtggacaggaagccgccggagcaccgcggggttgggggcttggggcagagcatggggcccagctgcagctgtgacttgttctcatagaataaaaaacagaactgaacttagccttcccagggaaggaaccatgccccacacatccagggagtgatgacagaggggacagcttgaagagctctgaaggacaataaaacccactcctcagtcctagctgctgctttcagtctctcctagcggctgcccctctgccccagccagtgaggccaggaagggagtaaagaggacatcccacaattgcgtccacccccttggccatcaggctgctcttccactacacgaaacagcccatctgcacctgccagtcactgcccccaggccctggggcttgcaggtgactcgtggggagccaggccaggcagataacctctgggacaggacgaggggatgaggaaggcagctggcaggacaagggcctacctgaaaaatacaccaggaagctgggctgctgcacaggcccaggcagatctggggcccctgtgctggcaaatctcatcttagcctctgacagggaacggggcagcatcaggcctccacagccaggcaaaaggggaaggccacgagccccaccaagcacaagggttcagactgccttcaacccttaaggggcactttttctctcaaggctcagaatagacaactgtgccaaaaagcagcatggtaggtgtcagcccaatgcccatccagggggctggtgccatggacggctaagtgggcaggcagggcagtggtgtgccccttcagtcacaagtaggtggggcccagctgcccacctctaggaggtggaagggtacagcact

SEQ ID NO: 482214 - DNA, 1000 bp, Homo Sapiens
ggagtttggccagaaaagtttcctacagaaggaaaagccgccttgcccgccggttttcggagacgccgctggagggcgccgaaagcccgtggatggctccctgcgagcccctctcccccgccgaggtggacccagtgccccagcgccctgggacagagggcgaatggcaaaccccactttgctctcccaaggcccttcccttcttggccggcccccgccagggcaggactgcgccctgcaggaagacagaagcagaccctttgcttttcaatcaggctgctttattctgttgtggcaggagttcccgggcccctgggcgccacctctgcccactcccatcctctccccaagctcccatttctccagggcttgtccctgcggtgtgggcagaagcagcttcttgcccgtctgcaaaagctgcaaaagaccctttgcccggggcgtttcctttcccgttggggcttccactgaccctgtgaagcaaaggaatgttgaggatggacagagagaattcaggggagtgggaagtaccggtctgtgagcttcccctcccccgagttgcctggatgaccccgcttcagtggacgccccagcgcctggtcagcgcgagcgctcctccacagcccgggcaggtggcccgagcgctcctccgctgctgatcaggggccctgggatcacacctgctcaccggaggcgtcctagatgtagtagagcggcacctcgccacacagggtgctcacggccatgcccaggaaggccgggtcccctccggagggtgctgagcctgcatctcgcccctctgcctggcccagcttagacgtaggcactgcgggcttggcctgcagagagcattccatctggaatgtaggaagtgagtttctatcccatgtgcagcccttattgtgggacttcaggtatatcaggcaatctctctgagcctcagttttctcatcagtaaagaggggctgtgctagagtcagaagccaccaggtagtgagtg

SEQ ID NO: 482215 - DNA, 1000 bp, Homo Sapiens; identical to SEQ ID NO: 308870

SEQ ID NO: 482216 - DNA, 1000 bp, Homo Sapiens; identical to SEQ ID NO: 120009

SEQ ID NO: 482217 - DNA, 1000 bp, Homo Sapiens
gcagatgggagtgtagtaatgaggacgaccagaggtcactctcatcaccatcttggttttggtggattttggctggcctctttactgcaaactgttttatcagcaaggtctttatgacctgtgtcttgtcttgacctcctctctcatcctgtgacttagaatggcttaagcatctgggaaagcagcccagtagttctcagcctcattttcccctgcccctattcaagatggagttgctctggttcaaacacctctgacaattgctgttgcgaaactgggaaacagtcagggaagtcaggtgatgtgctcaggtctcacagctggtcagtgtgggactgtgattagatccccagtgatcctactccagagcctgcactcttagcacctacaagagatgctccccaaaccgtggagaagtggaaaattcttcctaggccaagggaataatgtgaacaaaggcaggaatgtgcagtgtcctctttatctggctatcttctactggttctcctataatcaatatcgaaattagctagaaattcagccttctctcctttttgtccgcctgtatcccatctctgtttaaaatcgtatctctttactccatccagaattttaccattaggggcaactcaagcctgtcgggcaaccggcacccgacaaggcacatcaggcatatctattccatctgttaaattcctacggttttctagcttttaacctgagcacacctcttagcctctgctcctgagagccagggagcaaagcccctgaacacaagaccagaacttgcaactcacagaagtccagaaatagactcagcacactggaaaatacacacagcatatgcacagtggggcatatatggcgttgtactgtgtgcctgaattgtagatgtctccgctgtcctgaaacacgtagcctcaccagattttctgagccacaggccatgggctttgctatgaaattaagaattggcaaaatgtgaacagtagttggatat

SEQ ID NO: 482218 - DNA, 1000 bp, Homo Sapiens
agcaagccataccacttgttaaagactttgaacattatccctggctataagttacccggtctcaactgactgaaggaaaaaaaaaacggctgggtgaggtggctcaagtctgcaatcccagcactttgggaggctgaggcaggaggaatgcccagagctcaggagttcgcgaccagcctggacaacacggtgaaaccccgtctctactaaaatccaaaaaaaaaaaaaaatagccaggtgtggcagtgtgcacctgtagtcccagtcactcgggaggctgaggcgggagaactgcttgaacctgggaggcagaggttgcagtgagccgagatggcgccattgcactccagcctgggtgacagagcgagactctgtctcaaaacaaaacaaaacaaaaacctaaactaaactcagtgttgagggtgacaagagttctgaaaggcagacttgtcatttaattcccacctccacctctctctcgctgtcctccccaaagctaggaacacccagacccggctgaggccctctcgtacccattcagaatgtcctgcaatcacacacagagattattgcactcttttatttacagaaaacacagataaagcatttcaatttcaatgttcatttagcaaactgatccactctttttttttctttttggcacaaagaaatatcacagatggaccccgagatcaatcagaagctcataagattcatcagtcatcactggtccaggggcggccacgagactcagacagacagacagcatcaccacagactggaaacagaaacaggtccacgttcacctcacagtaaaaacctgcctcaccgacaggcaagggcgggcaggagggggcagtttcgctgctctaaggggggaaatgggcgtcaggggcaggaggcagggatggggaaaggatggacaccattcataaattagagacaagtggtcctcttgtttgtatcctcttaccttgaatagtaagacagtgcaaaaact

SEQ ID NO: 482219 - DNA, 1000 bp, Homo Sapiens
tttttttttttgctgtcaatacattcaggcagctagatctagcctggctggctggaagctgtcctggctctgtaaggcaacttggcagatctctactccgatctattccattttgctttcttgggtgtacagtcttatttcccttacttccaagtccttgagatgggaggaagtaacctcttttgcctgccagtgtgtagacgataactcacatcctctgtcactattattactatattagacatatttctttttttctttcttttttgagacagggtctcactctgtcgcctaggctggaatgcaggggcatgatctcaactcactggaatctctgcttcctgggctcaggtaattctcccacctcagcctcctaagtagctgggactacaagcacacaccaccatgcccggctaatttttgtattttttgaaaatagagagaggattttgccatgtttcccaggctggccttcaactcctaggctcaagcaatcctcccaccttggcctcgcaaagtgttgggattacaggtgtaagccaccgcacccacccctggatgtatttcttaacttctctggtctaggtttctttccctgtaaagtgtagataacaatttttaattaaaggatgtgctcaaagggtgaaatgaaataatgtgtgtaaagtgctgaggagtgtctgaaatgtctaataaatggaataataacaatactggcaatggctgtgattgtagcacacctcctgtgctccctggagctctgaggtatagctcccaccgtggatcttaacaaatgcttgctaaattgacttgagccaggactcaataagggatgcaatttctattcatctggcctcaaactgacttatggaaaaaggcatttattagttcttgtaactaaatcattcaggactagtctggctttgggcacaggtgaattcgggatcttaaatgatgtcttcagggatctgtctctgcctctctctccatcaaacttgtc

SEQ ID NO: 482220 - DNA, 1000 bp, Homo Sapiens
tttttttttttttttaagaaagatagtaaaagccagactcctttagggctttgaactgtacctacagaaaatcagagtgcagtgaacataatgttcagtcctacagtcaggatgcagttgctccttcccattccacaagatactgcacctttccatcaagtgtcacccgacgtgccaaaactcggtatttttcgccacatgctattctacctgcagcaccaaaataactggtaatggagttctttagatgattgagttgtaactcctgatctgctaagttattcagaatctctgtgttgagttcatcaaactgataatcttctttgccttcatcatcttttacaatttctgagttctgagtctggagtgctcttcttggaagacgacctcttcttctccgcaaatgtggtattgcagcaggccaagatcttcctgtacgcgttctttttctggagtcagataatccataatgcctggaaatgctagacgaggtagtttcttttgcactggaagcacccgtgaaatccacatctgaggtattggatgaatgtgcagttccctcagttctccctatagaacaaggtaaatccaaagtaggattctctgaaattgattccttatccaaaagtggctcagcagttttttgaatcatttttcttgtatatgggccaggtggacgacctacagattttttctttccttttttttctatgccattgcttacttcccttgaatcagatataggtttggatgcctttctgcctttaattttaaattcatgagatgttccttcaggttctttctctgctttgaaagccacatttggtggcacaggaggaacacgaattcgcaacccaaacaaatgcttcttcttctttatttctttcccagacataaacctaaatttttaaaaaaattaactaaaattttaaaaactgaacacatatacatagtagaccctaacttaactttcatatataaggcccttatacttgaaagc

SEQ ID NO: 482221 - DNA, 1000 bp, Homo Sapiens
gatcactcagtctcaggttttcttttcaactggcaccttccctcctgactttccaaagtaatattcgtttccattcctatagctgtcaccactccatcctcccagaggcccgctctcacctgagcttctcgccaataacctaagggtcctccctcacctatcaatcaagggcagaatctccgtataagccagtactctcctcaggctttaacgaccagagcccagtttctcctttaaacaacccctcactcaagctccggccagtcccagcctcagcatcagcgctgatcccatctctgccgagcttcgcttaggtctcgcagaaaacaacagttttatttatttatttatttatttttttgacggagtctcgctctgttgcccaggctggagtgcaatggcacgatgtcggctcactgcaacctccgcctcctgggttcaagcgattctcctgcctcagcttcccgagtagctgtaattacaggcgcgcgccaccatgcccggctaatttttgtatttttagtagagacgaggtttcaccaggctggtcttgaactcctgacctcaagtgatccgcccgcctcggcctcccaaagtgctgggaacacaggcgtgcaccagccaggccaaaacagcaggttctattcctctttctgcttagcgctctctccgactaacctggccctcggcctgcccctctagactaccaaatccagtttgcttctcgctgcttaaggccaatcacctgtagactctccttcagctgcgggatgagcatcttataacgctgcacaggatcgaagtcctgttgctgttgctgcaggaggccgctctgggcagggcccaccagttgtgctggcggttgcggctgctgctggggacccgggccgccagccgaactaggacccgatacaccagcagctgaggaagccgctgaagcttgctgctgggatgcagccatcttcctcgcgtagaccgccggaagtgcgttacgactgcg

SEQ ID NO: 482222 - DNA, 1000 bp, Homo Sapiens
caggaagtgctcatttgtagttttgaaattcttcagctaggttgaaacctctaaaggttgatcaaagcgctgtttgttgtagttggactgcagaacatcccggcaatttttcacccaaagatgagcttaaaaaaaggcagaagaggccgggcgcggcggctcatacctgtaatcccagcactttgggaggctgaggtgggcggatcacgaggtcaggagatcgagaccatcctggctaacacagtgaaaccccgtctctactaaatatacaaaaaattagctgggcatagtggcaggcgcctgtagtcccagctacttgggaggctgaggctggagaatggtgtgaacccgggaggcggagcttgcagtgaaccgagattgcgccactgcactccagcctgggtgacagagtgagactccgtctcaaaaaataataataataaaataaataaataaaaggcagaagaaaaccaggcagaaactgtattgaactggaaatattccagcctctttaagttatgggaaatgactttagtttccaatatatatttcttttcttttttttattttttgagacagtgtcttgctctgttgcccaggctagaaggcagtggtgagatcacagctaactgtaaccttgaacttctaggctcaggcgatcctcctgcctcagcctctcaaattgctggtgaaccactgtgcctggccttgtcaggtccatcttagactaaacattatctttagaatcaatatataaatcaggccaggtacagtggcttacacctgtaatcctagcactttgggagctcaagtcgggcggatcacttgaggtcaggagttcaaaatcagcctggccaacatggtgaaaccccgtctctactaaaaatacaaaaaaaaatagccgggcgtggtggcaggtgcctgtaatcccagctactcaggaggctaaggcaggagaatcacttgaacctgggaggcggaggttgcaatgagccgagat

SEQ ID NO: 482223 - DNA, 1000 bp, Homo Sapiens; identical to SEQ ID NO: 308874

SEQ ID NO: 482224 - DNA, 1000 bp, Homo Sapiens; identical to SEQ ID NO: 308875

SEQ ID NO: 482225 - DNA, 1000 bp, Homo Sapiens
cacctattagaatggcccaaatctggaacactgacaacacctaatgctggtgaggatgtggagcaactagaactctcattcactgctcatggacatgaaaaacggtacagccactttgaactacagtttgacagtttcttaaaaaaaaaaaaatactcttaacatataatccagtaatcatgctccttggtatttacccaaaggagttgaaaacttatgtccacacaaaaacctgtacacagatgtttatagtagctttatttgtaattgccaaaacttggaagaaaccaagatgtccttcaggaggtgaatggataaactgtggtacatccaggcaatggagtattattcagcactaaaaagaaatgagctatcaagccacgaaaagacttgtggaaacttaattgcatattattaagtgaaaaaccaatccaaaaaggctatatactgtatgattccaacgataggacattctggaaaaggcaaaactatggatacagtaaaaagatccatggctgccaggagttaggggcaaaggaggaagggatgaattccgcagagctcagaggatttttagggcaatgaaaccactctctatgatacaataatgatggacacaggtcattatacatttgtccaaactcacagaatgtgcaccaccaacaatggaccctaatgtaaactatggaccgtgggtgataatgatgtgtccaagcaggttcatcaggtataacaaatgcaccactctggtggggggtgttgacagcagggaaggctgcgcatgtgtagggcatgaggcataagggaaaactgtgttttcttcacagttttgctgtgaacctaaaactgctctacaaaaatagtcttcaaaaaagtcacctcaccaataaagagcagaccaagacaataatatgaatgataattaggttgtttataagctatttgtggtctagggtgggctttcctatgagactttatccgagtaactgcttgataagag

SEQ ID NO: 482226 - DNA, 1000 bp, Homo Sapiens; identical to SEQ ID NO: 308876

SEQ ID NO: 482227 - DNA, 1000 bp, Homo Sapiens
agccctagaatgaataatgagcctgaaatctcagttggagttccaaaattcctgggacatgactaagcttaggtgagaggggtactctctactcaattgactctaaaggaaattatcagaatagtactggaaatgaagtaaaatcatgggtaccatgttagaccaatctggccaaatcaatgattgcaaatgttgtgaagaattatcaaatgttttactaagatgattatacaaaaacctttaaaaattcaaatgaaagaattacatttagtaaagtgtaagtttgggtccctgggagtctggaggttgcctgccatactggactgtgatgaaagcatattcctactgcatgaagccagtgagatgttgggattattattgcagttcagctaccctgatactgcattactactataatcaacaggaaaacaaactaataagctccttccaaaatgcaaaacttcaatagtggcccatggtctacagaatgaagtcctcaagatgacatacatggtcttcttccatgacctaatcccatgcacttcacattctgaaagtctcattgactctcctaaatgttttccaaagaacctagacctgtttttctccctcacactactgatcccaatgtattgtaatgagttgtttgctgtccctctcttttcctagattgtgagtctccacgacggcagtggctttttttcttctttgcagatatatcttcaacacaatatcatatgttgggcatataaaagatgctgaatgaataatgtgctcctaaatgttcacagctccctgaaaattcatgtaattttagagcctggaaagtaggaaaaaccaattctcattttattgaaacatattgtcttctaaaattgttaattcctgaatacccaactcactgacttaaagttctgacaatattactgaaatgaaatgaaaagccatgagtaaataatatccttttgaattagaattggtttctagactaaatccttta

SEQ ID NO: 482228 - DNA, 1000 bp, Homo Sapiens; identical to SEQ ID NO: 308877

SEQ ID NO: 482229 - DNA, 1000 bp, Homo Sapiens
cctagaataagacaggacaagtaactggttgagcacagggtactttattgatggtacatgacaaggtgcggctccctaggcccctcccctcttcaaggggtctacatggcaactgtgaggaggggagattcagtgtggtgggggactgagtgtggcagggactccccagcagtgagggtctctctcttcctcttgtgctcttgctggggctggtggtccaggggtcttactccttggaggccatgtgggccatgaggtccaccaccctgttgctgtagccaaattcgttgtcatacctagaagatgaaaagagttgtcagggccctttttctgagccagccaccagagggcgccagaccctgcactttttaagagccagtctctggccccagccacataccaggaaatgagcttgacaaagtggtcgttgagggcaatgccagccccagcgtcaaaggtggaggagtgggtgtcgctgttgaagtcagaggagaccacctggtgctcagtgtagcccaggatgcccttgagggggccctccgacgcctgcttcaccaccttcttgatgtcatcatatttggcaggtttttctagacggcaggtcaggtccaccactgacacgttggcagtggggacacggaaggccatgccagtgagcttcccgttcagctcagggatgaccttgcccacagccttggcagcgccagtagaggcagggatgatgttctggagagccccgcggccatcacgccacagtttcccggaggggccatccacagtcttctgggtggcagtgatggcatggactgtggtctgcaaaaggagtgaggccctgcagcgtactccccacatcacccctctacctccctccccaccttgaaaggaaattatgggaaagccagtccccagaacccccaaccccagggttgcacgcagccccggcagggaggagccagtcttggatgagaaaggtgggagcctcagtcccattccccagctc

SEQ ID NO: 482230 - DNA, 1000 bp, Homo Sapiens
cttcctcagccaagagaaagaatattctcttcgcacttgtccctgggcaattccttgaaatggtatccttttttttacttcttcctcttgaaattgtgccccaaagagttcaagaaaccaataactaaaggaaattcttgaatttggaggatggcagataagaaaagaaataacttactgaaacactgaaactctctctccttatgagattaaaaaaaaactggctgaaatttgttggaaccaagatggctaactggagtctgcacagaacaagcttgctgatgtcacagcctgaatttccatgacatttcatactaactcctctggaatttgcacatgctacctctgaggcagcataaagagataactggacatgcccaaggacttttcagacctcccctttctttccaccaatcacctactaatctcagaatttaccccctgacattttctaataaaaatactgcttggaagccagcagagggagacagatttgagcttgactcctatcttcctgtgagttgacttgcaatataaagcttttgttggccgggcagagtggctcacacctgaatcccagcactttgggaggctgaagcaggaggctcgcttgagcccatgtgttggaggctccggcctgggtgacagcaagaccgtctcttttttaaaattaaatttctttcttttcccaaaaacctggttttacagtatgggcatcaggcagcaagctcttttggcctggaaacacttttttctttataaagtacatttttataacctgtttttgtttttctttgggttttttgttggtttgagacagagtctgtcacccaggctggagtgcagtggcgcgatcttggctcactgcaagctccgcctcccaggttcacaccattctcctgcctcagcctcccgagtagctaggactacaggcacccgccaccatgcccggctaattttttgtatctttagtagagacagggtttcactgtgttagcca

SEQ ID NO: 482231 - DNA, 1000 bp, Homo Sapiens; identical to SEQ ID NO: 308879

SEQ ID NO: 482232 - DNA, 1000 bp, Homo Sapiens; identical to SEQ ID NO: 308880

SEQ ID NO: 482233 - DNA, 1000 bp, Homo Sapiens
gaggatgttccctatagcacttccatatgatgtcaagttagtggccattctgccctacagatcaacagaagcacatgacgccagcatcctcatggagtcattcacaattagtaccagataagaatgcattgtgtagaccagtgctgccccatagactattctgcgatgatgaaaatgtcacgcttgtaatcccagcactttgggaggctgaggcgggcagataacttgaggtcaggagttcaagaccagcctggacaacatggtgaaaccctgtctctactaaaaatacaaaacttagccaggcatggtgtcaggtgcctgtaatcccagctactcatgaggctgaggcaggagaatggtttgaaactgggaggcagaggttgcagtgagccgagattgtgccactgcactccagcctgggtgacagagcaagactctgtctcaaaaaaaaaaaagaagaaaaaagaaagaaaaaagaaagaaagaagaaagaaaaaaggaagaaaatgttgtgtatttgcactgtctcttacggtagccctgaggttatcaaatactggaactgtggcttgtgcggttgacaagctagatgtttacctttatttcatttaaatactcacatgtagctagtggctactggattgaacagtgtaggcatagaaccaaagcttggaatatgaaaacttgaaaacacttgatcctaattatgcaaccttcctggggtatattcctcttggtttacctggaaaagcgcattataacacagccttggaaattttgtgttcttctaggtcagctataaaaatgctacataagatccttctaacagtgtatcagaactccattctccacatttctccagccagagacatgcccatttatgcagctgttgatttcctttctctaagtcccttcatgtttcacaaaataaccctcaagttctaaccccaattcccctaagtccatctcatcccactgaaacacattttagcctttggtt

SEQ ID NO: 482234 - DNA, 1000 bp, Homo Sapiens
catcgtgatgtcttatttaaggggaacgtgtgggctatttaggctttatggccctgaagtaggaaccagatgtcggatacagttcactttagctacccccaagtgttatgggcccggagcgaggagagtagcactcttgtgcgggatattgatttcacggaggatggtggtcaagggacccctatctgaggggggtcatccatggggacgagaagggatttgactgtaatgtgctatgtacggtaaatggctttatgtactatgtactgttaagggtaggtaggtttgttggtatcctagtgggtgaggggtggctttggagttgcagttgatgtgtgatagttgaaggttgattgctgtacttgcttgtaagcatggggagggggttttgatgtggattgggtttttatgtactacaggtggtcaagtatttatggtaccgtacaatattcatggtggctggcagtaatgtacgaaatacatagcggttgttgatgggtgagtcaatacttgggtggtacccaaatctgcttccccatgaaagaacagagaatagtttaaattagaatcttagctttgggtgctaatggtggagttaaagactttttctctgatttgtccttggaaaaaggttttcatctccggtttacaagactggtgtattagtttatactacaaggacagggccatttgagtattttgttttcaattagggagatagttggtattaggattaggattgttgtgaagtatagtacggatgctacttgtccaatgatggtaaaagggtagcttactggttgtcctccgattcaggttagaatgaggaggtctgcggctaggagtcaataaagtgattggcttagtgggcgaaatattatgctttgttgtttggatatatggaggatggggattattgctaggatgaggatggatagtaatagggcaaggacgcctcctagtttgttagggacggatcggagaattgtgtaggcgaata

SEQ ID NO: 482235 - DNA, 1000 bp, Homo Sapiens; identical to SEQ ID NO: 308881

SEQ ID NO: 482236 - DNA, 1000 bp, Homo Sapiens; identical to SEQ ID NO: 308882

SEQ ID NO: 482237 - DNA, 1000 bp, Homo Sapiens; identical to SEQ ID NO: 308883

SEQ ID NO: 482238 - DNA, 1000 bp, Homo Sapiens; identical to SEQ ID NO: 308884

SEQ ID NO: 482239 - DNA, 1000 bp, Homo Sapiens
gatcagggtactgtgatgaaataaagccacatagaaagtctgtgcggtgctttgcaactttcttctaagtctaaaaccactttaggggttggcgtggtggctcacacctggaatcccagcgctttgggaagctgaggcaggtggatcacgaggtcaggagatagagaccatcctggctaacaaggtgaaaccccgtctctactaaaaatagaaaaaattagctgggcgtggccgggcgcggtagctcacacctgtaatcccagcactctgggaggccagctgaggcgggtggatcacaaggtcaggagatcaagaccatcctggctaacacaatgaaaccccatctctactaaaaaatacaaaaagttagccaggcgtagtgacgggtgcctgtagtccagctactcgggaggcagaggcaggagaatggcgtgaacccgggaagcggagcttgcagtgagccaagatcgcgccactgcactccagcctgggcaaaagagcaagactccgtctcaaaaaaaaaaaaaaaaaaaatttcaaagtgaagtgtgttttggagattttttgttttttttttttttctggtagagacaaggtttcaccatgttggccaggctggtctcaaactcctggcctcaagtgagctgtctgccttggcctcccaaagacatggtgaaacgccatctctacaaaaaaataccaaaaaaaaaaaaaaaatggccaggcatggtggttcacacctgtaatcccagcactttgggaggccgaggcgggtggatcactcgaggtcaggagttcaagaccagcctggctaacacagtgaaaccccatctctatgaaaaatacaaaaaaaaaaaaaattagctgggcatggtggtgcgtgcctgtaatcccagctactcaggaggctgagccaggagattcacttgaactcaggaggcagaggttgcagtgagctgagactgcaccactgcactccagcctgggatacagagtgaga

SEQ ID NO: 482240 - DNA, 1000 bp, Homo Sapiens; identical to SEQ ID NO: 308887

SEQ ID NO: 482241 - DNA, 1000 bp, Homo Sapiens
cttagtgtcctctcagtactgacgctctggaaagatgcagctaacagctgccacatggattagccctaaaggtcaggtaggaaagaggcacagagttgtttggagatagaagagagaacagtttcctataactctcattctgtttgcttggcagctttgagggttttgagatgggtgcttggggcagccctgttggctgtgtgtcccggagtatgctggcacttggagaatcaagaactatgtggctgcaggtgatgcagtgagatctttttacttccctgaatacatcctgggaagagctgcacccacagccagaacggcaactactaaacttgtgttacatgctctgcagatggcatctgcaaagtcagcagagacgcagtagagaaaaaaggagaagtgaagattcaggggtagttcaaggagtaaaataaaacctaaaatgtgtgcctgggttgaaggtccgggctgggagaaacaagaggagaaagaaaaaaagaggaagtattgcataaagcaacagacccatttgatacatatgcagaaggactaagaaagactgattgaatgctttgatcacatgagtcagggcaagctgctggtgatggggtgaagaggaatgcatgaagctgcctcccttagggtgcaagctcaggatgcccagtcagctttagcccagaatgctcaccagcctgacttcttattcagagacttgtcatggcatttcacaaataccgcaggtgcctttcctttctgcaaatgagacactttctccctagaacagaagatcaccctgtggaagaaaatggatgtgaatatgccatgtagaacaatcaaaagcactgttcacaaaggtacagttctgtcaggactgtttaaataatacatgatcatgctgggtaattgttttgatattcccaataattaactgtcacactcaggccacatcagaatcagagggtaatttgagagcctaacccggtgttcagcaaccaagcta

SEQ ID NO: 482242 - DNA, 1000 bp, Homo Sapiens
gtgggagtcaataagtgcatattatcaaaccaaaaaatgtggtttcattctgcttctagtatacccctcaacaactggttatagttaggatatatcacagttgtggttatatgaatctgaaattataattttaacatttaaaatgtttttttagtatacattcacaatatgtaatgtatcatattaaaaatattacctttaaataccacgttaaatttggttaataaatgtctaattttcagtgtggtactttgaaatatacatacatataatatgtacacaaatatattctaaatgtcccgcttacaaagaataattgcctttgcatcctgaaaaaaattgcatgagagtactgttacactgtactctgcagctctgcaatcccattacattttatagatgtgtaaatgggctattaatactcctatgaattttatattgcatgttagagctattatatcaattataatgactgatacctgggaaataaactatatttaccctcattttcatatggacagacttcttggacccttaatggattttttcatatgtggtttgggttttatgaaaactggcataagagattcaatgactttgccctctgcctaccatcactcttttgccttctaacattgcacatatatacaccagccatggcacagagcacatacacaaacacacaaatatttcaaaatgagaaaatgtctaacaatactgcataggacattgacgtggtaatacaaccagcatctgtacctagatgctactattatcagaacatcggttattctcatgacataggagtttgtctcttctccctcaatctccttcatagaacagttaagtttcttttaaagaaagggaaaaatggatgcttagaaacatggtgtttttaatctgatcttgccttctggcttaccctagagattgtgtatttgtgtgtgtatgtatgtgtaaaaatcacattatatacaatacaatttttacagaaagcctg

SEQ ID NO: 482243 - DNA, 1000 bp, Homo Sapiens
atggaatgagactctgtctcaaaaaaaaaaaaaaaaaaaaagaagccctagatttcggttgtgttggttgtaaaaggagagacccagtaagtgggggttgtgccgcagattgctacccacaatggacgggtcactgagcaggtccggccaactgggcgttccctcgctggagggccagcacaccagactgcaggtggcgcgggtcagcaaggtaccaggggatgtgtcacacacacagcccacccccgtccagtcacgcacggacaccctgggcttccgagcaaacctgctcccacgtggtgtgaccacatggagccacagacacccagcaaggacacgcagcccgcacacccccggtactccagacacagtgacctgcaccagggctcgaggtttctctagggaacccacctcttagaatcatccagaaacaagtcactcttcacctgtccagcaaaggcctgctgagaggtgcacagtgtctggagtccaagctgcgccaaggcggcaggacccccagcccagcccaggacccccagtagagccctcacctcagcgtggaggcctgagaacgtgaggaaggagctgtccagcacggacgagtccaggcagctgtcgatgtccagcacctactgcccggcaggtgtggggctcaggctcccagccacctgcaggacgacggcagtggtcagcgggcggcagctcagacctgctcaggacagggatgagaagccacctcctcagcagacaggacagagcccggtgccatctaacagaatgtcctagaatgctggatatatgggacatctgcaccgtccgtgatggcagcccctcgcgacatgtgccactgaacacttgacagcagactggtgcagctaaggaacagagttttgaatttcattttttttttttttttaagatggagtctcgctctgtcacccaggcaggagtgcactggcgcaatctcagctcactgcaacctccacctcccgcgttcagg

SEQ ID NO: 482244 - DNA, 1000 bp, Homo Sapiens; identical to SEQ ID NO: 308889

SEQ ID NO: 482245 - DNA, 1000 bp, Homo Sapiens
aggccttccttccccttccctcttctatccccctctgcctgcttccaggtgctcagccccttccctccctccggcagtccagtacccaagtcagagagtggaacacctcagaagatcatgacttttaatgctttattgggattgcaagcgttacaaggttaaagacaaaacccaagcatgggattttgccggaaatattagcgttaaaggagctgagttgagtcaaacacgggccgcaaggtggaccgaggcggcaggcacaggtgacattcagtgtttggcgtgggggtcttcaggtgatggcagaggaggggacccaagagggggccccccactgaagacattggggacacggggaggagacaagatggagagccacgactaggcacggaggtcagacaggcagcccgggaacacccactccggcgaggcagaatataacactgggtgggtgggtgtcctgacgaatgggcaggtaatttggggtgcctcgaagcgttttggatctcaggccaatgtgggttccacaattgtgacaatttggctctttgggcttctgtccaatgttccgaatggcccactcacagggcgcttgccgagggaccctctgcgactgaggcggactggcatggacgacccccggggtcatgccagccccgtcaccaggacccagaagcctcaggcctctagactgctagtcgggctgcgtgcaggggggctgagctgggggcacaagtgggggcgaggtaaacctcccagaggccgagtccctgccgcagccctaggcgccgcggtggtggctgctatggcatcaccagacccgtgggctccggggcccaagcaacctggtcgatgggcagacctggcagctctcctgctctgtgggctcagacccgcctgacctccctactccccggcctcaccccaccttgcccccaagaggtcccacagagcttcggacctcctggagacaaggcagggtgctgaggggcgggcaaga

SEQ ID NO: 482246 - DNA, 1000 bp, Homo Sapiens; identical to SEQ ID NO: 308890

SEQ ID NO: 482247 - DNA, 1000 bp, Homo Sapiens; identical to SEQ ID NO: 308891

SEQ ID NO: 482248 - DNA, 1000 bp, Homo Sapiens
ttttttttttttttttcaattattaaatgtttggcactttattaaattaattaaataagctccaaaattaattacatacaaatcaaaggaataagaaacaataaatagtttattcagcaaacacctctctgcagcagccggcagctctgaggccgaggctggcgtcctgtggcagagggcctgtggattgccatgctcgctcccaggggtggctcaacagggacacaggtctactccttccacatcgggtttccggaacaacaactgaactctcattcattaccatcccattcattaccatttttttttttatagactaataagccaagagctttattgatgcagcaggcactttacaatgagcccaagagtgtccaccttctctgggaagacaggatgtctgtacaaactcttgggtttttttccacttcaaaaacacaagctctcccgtttaccacagcccttggatctgcacctgcccaaaccatccctcccccagtgcacacaggtgcatctgaccaacaccagccgccacgctggtagaccgtcaaaatgtcagttctgcagtactcggagacaaaggcatagactatcagatcctaaacaggatttaggaaacagacgattttcccctccaccttgaaaataaaatacatttcagcagatacatgtcctgaaatagtttacttgggagttcctaggaagatggtccattgtcaatcccttcttcaccagcctgggcatccagaattcttctcaaggtaacatgagtctttttattttttttaaacagtctttcttgctgtaagaactcttataatggagcctagtcctcctactgctaaggccttttcgtgccactggagtaacactgcgctgctattttctgtgggcttctcaaagcctttataaatgtacttcattaacaagtcaacgccgtttctgtccagtgactgcacagcctgctcaatctcactgctcttgaagtttgtgagcactt

SEQ ID NO: 482249 - DNA, 1000 bp, Homo Sapiens
ttgtatgcctacaaatttgataacctacatgacgaagaagtccttgaaacacaacctgccaaaactcacaccagaagaaatagatactccaaataacacctgtatctattttaaaaattgaatctattgccttcccaaacagaaaatgctagactgaggtgggttcactggtgaattctaaaaacgataccaattctgtagaaactctttcagaaggtagaagcagagggaattacttcccaactcattctatgaggcctaaaaccaaaaccagacaaaaatatcacgagaaaactacaaaccagtgtctttaattaacatagatgtaaaaatcctcaataaagtatatagcaaatccaatatcatacaatagtatacagaattatacaccaggatcaagagggattcatcccagatacgcaaggctggttcagatattgaaaatgaactaatagaatctatcacataaagaaactcaagaaaaatcatatgatcacatcaatagatccagaaaaatatgacaaaatccaaaacccattcatgataaaaattttccataaactagaccaggcgcagtggctcatgcttgtaatcctagcactttaggaggctgaagcaagcagatcacttgaggtcaggagttcaagaccagcctggccaacatggtgaaaccctgtctctactaaaaatacaaaaaattagctgggcttggtggcaggcgcctgtaatcccagctactcggggggctgtggcagaattggttgaacccaggaggcggaggttgcagcgagccgagattgcgccactgcactccagcctgggtgagagtgagaccccgtctcaaaaaaaaaaaaaaaaaaaaattctccaattctccataaaaaaggaatggaggggaactttctcaacctggtaaggaatatttaccaaagatccccaaccagtaacatcatatttaatggtgagaaatttagcagttttcctactaaggaggaaggca

SEQ ID NO: 482250 - DNA, 1000 bp, Homo Sapiens
tttttttttagtttgtttaaagactttatttgaaaccaatgtcacagcacgttagtcataaaaatcatcagaatcatcggtgttatggtttctggggcgtaaagcagcctcaatttctgagttactgtcatcagactcatcccagagggctggaaaataaaaccagacagttatttaacatttttgcattctggttaagagcttacaaaacagcacagcacggaaggactggttaagcagagtgtcagtctgcaaaatgcataacagggacaccacatgatgtacctgaccagacacacccaaatgcatgtcatactgcacaaattacacattgcaaagtgtgtcctctgcactgttatggaaaacaatttgcagaatacttccttttcccttctgttgtgcccaactctttattataggatagggatttaaggtcagggttacatggaagcagggttccctggggtgttgtatcagcctgatgccgccccacctcagctgcccctccactttcatctcccattcttctttatgagagcagagaggagaagggaaagacgtggcagaggaataagcagagatggttaccctgagacaggactttggtccacatcatttacttgagaggtgatcccaggaaccatggggacagtgacacaaggaagacaggaagccaatgaagggtatgatgacgagtgggtgcctggcagtgagtggacaggcaaggctcagcctgctggggccccctgagagactgcagaactctccccagattgtcccagtgaagagcaagggagtggggttactgatccaccaacttgcctctgttggttgagggttgctctcaacccagggcatcaactccctggtactttgggctgccttgtgagggctgagcacgctcctgcagccagagaaagccctcaggcagagagacacagctgcttggtgcaggaagctgtaggcgcgtctgtgaattggagctgaggtgccctgcagg

SEQ ID NO: 482251 - DNA, 1000 bp, Homo Sapiens
tttttttttttttttttttttttaagcttaaggatctttactttcagtttagccagagtggaattagaacagggatatcattaacagccagccaggacagaagcgaaggcgtctcagaagcaacttggtggaccagcctcaggaaccccgggtcatgcctgcacttcccaccttcctgcctggggagaggcccagtcccctgagggaccctggagagcccacgaccagggccgccagcccctgcccagcacactgcaggcccagctgccccttcccagggcgatgtgtctaggctccggagacagcccagtccagggtgggtctatgtctgcatgcagccgaggatttccgtcacctggccatggggctgttccacacctgctcctgggatccagcagtgcagcccgcaagaacagacccaaccggggccaagcctcaggttccagaagccacgcctgcctcctgcccctccttcagggccctagatggctgtggcctggatcagggctgggcagagggtgaggcaggagccaccccaccttctgctggggacacagacaaggagctctccggactggaaagagtccccatgtccagtgggtcagggctggaaggggagacaggggaccccatcagcttaggggcctcggattctgtccaaaccccttccctcgaggacctggctgccagctggaaactcagctggtccccaaggccagagcccccttgagcttccagagcctcgatccccctggacttgacacccccgatgggcacctgccagcctcactcccgggacccaggatgatgcccccaccaggaccctccatgtggacccaggcacgtggcctccaggaggctggtgcccagccacccagagacacaagccagctgctgatggtggacagggtgggtcatgaactcagggagccaggggctcgcctctccccgggaaggtgggcgcagcagcagggagcacttggcagcactcgagccaaga

SEQ ID NO: 482252 - DNA, 1000 bp, Homo Sapiens
ccgctgggggttcttcccagcgcaccctgaggaaaggggcaagggctgtgaggaagtgaagggtccctcaagtgtgctcccctcaccccaatctcagtgcccaccatgggacatgggaatcacctgtgtgggggactgagtccccttcaaggcagctgagccccaagcaccccggctgtgctaagatctccaagatgggcaagaaaatctggggacacaactgccaaacaatgagaaaacttaacttggctcccagcccaaccacgtcctttgatgggtagcagatgccacaaagagtggctggtgcagctaacacatacctggaacgacacctcctgtcctcttgttctgttccaaggttgtcaggctgggacgaaatcccaagaaagaaatgggcatgtggtcactatcatagcagactgccagttagggacatcagaatatatttctctgtcctcaagttaggaagtgagaggacaaacctggccttctgtgttgtttcagccactaattggttttgtcaattaggcaaaacataatttctctaagcctcttttctcatccacaggcattagcctagtcagcggttctcaaagtgtggtcctgaaccaacaacgacggcagcttcaccaagagacttcttagaaatgcaaattcttgggcccatgccacacctacagaagcagacactctgggggtaggcccagcaatctgttttaacaagctctccaggtgattctgatacacagtaagttggaagaccactggcctagctgatgtccctttttattgttttagaaaccatccttccttacggcctcctatctgtagtgctactgacttcatttaccccaaacaaatatttacaaagtttctactatgtgctaggaactggggacaccaggggaacttacacgtctgctttgtgtttaagttctcatcacaataaacgtgcacgcagcttgttggctggttgttcactgagtaagcagcacaactg

SEQ ID NO: 482253 - DNA, 1000 bp, Homo Sapiens; identical to SEQ ID NO: 308894

SEQ ID NO: 482254 - DNA, 1000 bp, Homo Sapiens
agaccatacccacctcacaaggcctatggtgaaggtcaggctggtcaaagtgctcaagtgatgtccctgggcttagacccagcagaggcaggagtactcctgactctgccttctgccctctggcgcgctgccccgtcaactctgccagagccattgggcaccccccagaggccgccaacccagcgcctactgcccagcaccctccccatcctctgcttccaaccttctggtgtgatgtgttattctttcttccacttgcatccggctggaggagcagaatccctttcttttcccaggcggttccccagaccccagttagaacacagacttcactccctgcacccagaggatgtgggtgtggctgggatcccctagtccagaggcagccacagcctgccagaccccagctccctctctgactgcagctgccaccagcccctcccaccatctgggacagaatctagcccctgggagccagcagcctggttccattcagggaagggcaggctctggagtgacctgtgcctgactcccactcctgggcctgccaatcaacttccctgggcccacctcctccactcgaaagtgaggatggcaccatcaacgccccagagcctggggattgtgccaggtgatggggtcacaggttgggcccccacctggtgctgtaagggtaactgaggtccactccttcctgcagcttagccttgagagcaaagacgccagacaggggaatgaggttttattcaggaagagctcaagatgggaggggagcccctggggttgcaccctctcggcctcttgagaccaaggctgatgggacactagaaactaatgactgcagcatctgagcttcctcggagtcatctgtgggggacacaggggcggcctcagagtcacccgtagcggggatggggcagcctcagtgtcacccaaggtgggcacgggcctcagagtcacccgtagggtacgggggagcctcagagtcacctgagggggg

SEQ ID NO: 482255 - DNA, 1000 bp, Homo Sapiens; identical to SEQ ID NO: 308895

SEQ ID NO: 482256 - DNA, 1000 bp, Homo Sapiens
cacagctgtgcaaaccctttattaaagcatcaatcaaaatacaggatggatcacatggttttctgtttttgctactgtaataccaacttatatgagtaacttgtttacaactttatttttaaaagtgaacattttacagttcacagaatcaccagattgacatttctgtcgagacatttttccattttccaattttaacaaaggacatccagaactactgaaatacaacaaacgaaatctaagtgcaagcatcttccttgattctcattgttagcagctctatggtgtctgagatatacatttggaggctattttattggctaaataaaaataatttatgccagaatattcttagaactatttactttctatttttacattctctagcttcaattttgattgtagtattcttagtatcagcctctttataaattctatctctaaaaaatctgttaaagatcattatcatcctcatatgatatcttcgtgaataaaagataaatgctcagtcctttggaaaatataataagcaattgttttatttgatttttcccccacaattgatttgtgtaacccaaacctggttgatcaatgaagaaaccctaaaaatgtcattaggaaaataaactgtgctatttactgaaggattttttaaaatgaccagtatcttgatgctcaaaatatgtgaaaatacaatgagatttggtagatattttaagagtatgaataacttggtttaaaaaccaaggatagaaacatttatagaattactcaatgccaaaagggtacgtgaagagcggtaaaggaaagtatctgaacaatgctgagaaaacagagtatctgaaatgtaaggtaaatgttctgttttggtaccaaatgaaacactgaaaggaaatccccagttaaaagaaccacagtgactgccactgaagagttttagcactgatcaacactgtatttcctagggcagaataaaaggtatctggtttgcctttctaaa

SEQ ID NO: 482257 - DNA, 1000 bp, Homo Sapiens
ctattaatcttttattattaagacggctgaaaaaaatgattacatattattagtgaagctcagtggaagagaagtgggtggaaaagctctaacccgagaggccgctttcacaggatgggaggatgggttacattttgcaaggtgtaccaaagggttaaagtcattttcattaaaatttaaatttcagcatgcgctcactctcccttccccgtcctttgaacgtttgactggcaaccatttcatatttcaatctcggcagaacaaattgaattagatgttgaaaccaagctcggctctgttcaccaaagcctgcatgctctgctcacactaatcctttcctagacgctgcggagcacagacgggcgctgcgagagacggccctgcacaaaagacaaaaaagaccaaggcggcaggaaaaggagaggaggaaaaacaagcgggcagaggccgctggaaattgtcttccacctgatgcatggggcttaaagcctaggagacagagcctgcgtccacgcagcagggaaggccagtgtggaggcacacagagcgacccgagtttctgtcttgtgtctggggcacccagcacagtgtctcgcacacagcagatgcccagcaggtgtctgatggatgaatgaatgaatgaatgaatgaatgagggagaggactcactctatcagcccgtgcctctagcctgtgcctgttcctcccctctgcagagtgggcccggctattctcctcaccctcacaacttcctgagaagtgatagcatgctgtgctcagtggcctggtggctctccagtccccgtgcccagtgcaaaccagcggaggatgccagctcaagtttctggggacgaaacaggcagacctccgggcctggcttgggatcccagtggcaccccaggatcaccccatgttcgctggctctttctttaaactgtgtaagtctgtggaatgacctagaggtgctgacccaggggccccggagtctggttttcagaag

SEQ ID NO: 482258 - DNA, 1000 bp, Homo Sapiens
gaagtaattcatttcattaagtgttttgtgaaggacataaccccccgggacacacgagaatgcctccgttgggactggaatcgctgcccacaaacaaacggagaaacagtcaaaggtggcctaagacctgggaaatcaggagcagtggtccacatacaaaatcagggccaaaacgttttactttccatttgaatttacaaccatatacagacaatatggtaagattttagagaaaacagatcatcactacgaatatccatattctgatttcttttgagaaccaaggtgccttttaaaatgcggctttttagaatagcatgtgttgtttctgtctgggatctagatcttgtctgctacaaaacaaatgaacacaccctgtgtaacaaaatcgaattttaacatttaaatcttgattccaatattcctgacctatctcttgtcatatgaaagaaagaagcctttttttaaaacaaagtttcaattcagaatttttacaaacaaaaacaatcctgcgtctacttaatatccctgtatatcctcaaaaagcaagttcaggaaatttaaaaatgatttataaaaggcactgaagttagcaaaagcattggtgggttttcattttggattaaacactggaaatgttcacagagaaacaactgtgtgagcagttgcccgtaacacccaggaagaaaccgacctccaggcagcacctcctgaacacctcagcggctcctcacacattccaaccacagaccttcattcaagtcaaggtgaaggctacagtcagcacggcaagaaaccaagatgggactcaaacctctaaatgcaacactctgcatacaggagatcccaactgaaatgagttccaaaataacggatacctttatcgtataatcatttatgctcaacaaagcctcaggataaatttgaaaacagaacaatgtatagactgtattactgctgcactggctcctgaatgaagcaggcggtgaaggctcacgtg

SEQ ID NO: 482259 - DNA, 1000 bp, Homo Sapiens
gaaacacaaaaatatgactatttggatcttgtcttaatttacaactggtaagttcctttttaatgcttaaaaaaatggacatggtagaattgctacacacctgaaaaaggtctcaaatagaatgttccattaacaacaacaactcagaaatctaattcactctacagattttatttctgatcaactaatcaacttttattttcttgagcctggctgctgctgattatgtataacttgccaaataactacacatcactgatttccaagcttttttccgttttatttttcctctttaactaaggtacacctagaaataacaagacactaccaaatagctgcaatggccttcaaaatttcttttactggccgggtgcagtggttcaaacaaagctttcctcattagtaagagatcagaaagccagatgagaaacttttgacttctggacatggtgtgtggttcttttagcttcagtataatagaaggcattgggatttcaaaaaactgttctcgaatgggcacaaagggcaagaggccagtgaagaaaaggccaagaatgagcaggacacgttgtagactgaagagtataggaatatctgaattctctttgtagcacttttctacaatttcataattggcattaccccacactgttaagtgttctcgattataccgcttcaccaactctgaaaccttcttaatcagcacattgttgttgactttgatatcgatgttaatgggagtgttaggaaaggcctcaaaaacttccttcagtaatggaattcggttatcttttccttcacactggcatgctctttgaaatgagacatccagtttgccaaggtaaggtgggagctcacagtatttgagatcagagatgtttacattgaccccagttgctctctttagattctcatcatgtgacactacaacttgttcatcttttgtgatatggcagtccaattctagcatatcagttccgattttaaccgcatgctgaaa

SEQ ID NO: 482260 - DNA, 1000 bp, Homo Sapiens; identical to SEQ ID NO: 308897

SEQ ID NO: 482261 - DNA, 1000 bp, Homo Sapiens; identical to SEQ ID NO: 308898

SEQ ID NO: 482262 - DNA, 688 bp, Homo Sapiens
  misc_feature (272)..(272): n is a, c, g, or t
tttcatgaatgtttttttctgtaggtaaactcttattttcatatgctgactccaaatccagtgagaccaagttactgtagttctccagcatcacgtcccagtacaggtccctctgagcagagttcagacaggcccactcctcctgagaaaagtctatggctacgtcggcgaacgtcaccaaaccctgggccattgttttagaactgaagaactgatcagtcttctcggggtttccactgaagaagacaaattccgagaggctagagctgacntaagatgtttaacgattcgtcttcctcctcggggatgctttttctgaaggatgctggcctggggaaaacagaaccagaagggtaacacctgccatacctaataaaaccaatgagaaatacgaggccccgagatggagtttctgggagattcctgaagagcacgctgtggtaactgagatgatgaagcgtggagctgcccctctccctgtctcccacatcagggacctgtccctctacaggaggaattctactcctgaggccaccgtctcctgtcactcaggcgccctgagtggagagcacttctagctctgaaagcgtcacctcatggctgtttctgccttcttgttggtgaatttcctggcagggctcaggcactcccgtccttccgcggcccttgttctcaggcaggtaccgct

SEQ ID NO: 482263 - DNA, 1000 bp, Homo Sapiens
ttttttttttttttttttttgaaggagttaattacatgtattgattaatggatagggtaaacagacgaaaatcaataaacctgagccaggctgccccagagtgctcccatgcctgggctctgtctgctaagagggtcagaggcagtctttcctggtcagtgccaggatgaagccagtcctgggccagggtgctcaggcctccagatggattgccctggtgggtgacatcagcatgggctacagatcagtcctaggatcccgctcatcactcgctattggcctcggcctcactgcctgtgcctgcccagccatatgggtgcaatggcctccctgagaggagaggacactggggagggggagaaggcctggcacagtactggggaagatggaagcagcaaacaaggctgtgaacacagccaggatgcaagccagtggagccagtgcagagcacacatgctcagatgatgttgttctcctggatcttctctcccaagtaaaagcgggtaaagaggaaggggctcaggtcgatggtctggaacctgcccttcagtaccatctctgctacagctcgcccaatgccaggggcctgctggagcccgtgaccactgaagccagtagcaaagtacatgttgacaactagcgggaaatgggggcccaccacgccattctggtcaaaggtgttgtagtcgtaatagccggcccaggcgctctgaaccttcagagtctcaaaagctgggaccctcagggccaaatggggccacaccttgtcctggaagaaatcatggtccacttccaggttcgccgggtccggttcttcctgctcagtggggctacgaccacctaggtagttgctacctaatccttcccggcgaaaataggctccactggtgtctgcaacaagcggagtctctaggcctggtccctgggggcagtgccacacatacacataccttttcctcggctccacaggtagcttggtgccctgcagggtgccaggcgg

SEQ ID NO: 482264 - DNA, 1000 bp, Homo Sapiens
tttttttttttttttttttttttttttttggaattcgttcttctcttttgttaaaagggggaaaggaagtggatgcgggtacccccaggtgcaggggaggcatgcaggcagccccagcaggcaggcgctgggaggcggtgggaagagtcctggagtttcccacaatccttttctctgcaaggaacagcaacgctggctgacgagggggtggggaggaggcagggccctggggagggggcggcgggcagggggctgggggctcacactaacatgcaaagtccagctgccccaggaactaggttgcttctgaagagcgacacacgtagaaatacacagacacggccacgcgcacacatgcggagaggctctgcattccctagggtgggggttcgaggcctgccggcccccaaggagctccaagccagggatcagcaatgtctccgccagggtggtcctccacggcacccctgggctgggctgggcaggtgcgtcttcgaaggaaggctgcgtggtctctgaagttctgtccgccaggcacccaggccgctctgaaccactccatgtgccggggccgctggggccatgaccttgcgtgtgggcagctgcgtgttctggcaccagacgtgtccctgcctggctagagtccgcgctctcccctccagggctccggggaacaaggggtgcagacagaaaaggggtgaagggggcccgcagagacgtcctctcccccgccccacgggtcctggcctccgggaggggggaggggcctcccttatctctctgcctccatggcagggtgggccctgggttctgaggtggcctgttggggggccaggggtggccagtctgaagccggagaagggggtgttggagtccacaggggcggctgtggctggtggtgctgtgggccccccgggggcgaggccgccgtgggccagctggaggccgcagagctgctggtggcggcatgggggaagtgtggcgggggtgacgtggctgt

SEQ ID NO: 482265 - DNA, 1000 bp, Homo Sapiens
ttttttttttttttttttcattcagtacgtcttgtttttctgagagaggcaacggcagagggttgggggcagtgtgtgtgtatttgtgatgaacctaactcctcatgccagttctctcgagatttcttcgcgggggctgccgcgaggaagcagccctcgcccctgtcggtggaaagaaggaagagagttctctaccacagaccgctgtgggtgtagccactgggtccggctctgcagcaaacgggttgtgtatgtgtctgcagaactggggtgacgcccatctggtttaccgctcagggtgatggaatccagtgagctgattaggagaagcgctgtcattttccccagcctgggggtacccatcaaatcgccacccgtttgaggtcaagctcaggctccaataaccccaagcatcacgctaatactaagcactttccctgccctgggcggaggacaaagggggacaccacctcgccgtgcagcaccattgctgagccccccaggttaccccaggcctccctaggccagctccagccgagtcccagacgaggctcgcagtccagcctccgctggagcgacgtgggtctcccctaagctccaagagttctggtctcccgcgaggggcggagttccctccccagtcccgcccccgggcccagcccaagaaggcggggtccggagttcgggactaaaagccggggcggggccgagcttgtgcgccccgccccgctccgcctgcctggcgcgcggggctagtccgtgccgtccaccagctcgcacagcatgttctccagagccgtgatgcgctgctcctgggcctgcacccgctcgcggagggccttgatctcttccagcagcgtctccagggtgtgctgcgacaagggggcgtcgctggccgactggctgcggcgggggccggagggcgggcgcacgtccaggatgttgcgcttcgtgacccggagctcgcggtgcttggggggcacatagccgtccctcagcg

SEQ ID NO: 482266 - DNA, 1000 bp, Homo Sapiens
ttttttttttttttttttaactttttgagacagggtttcactcctgtcgcccaggctggagtgcagcctcaacctcctgggctcagtggatcttcccacctcagactcctgagtagccgggactacaggcacacgccaccaggcccagctaattttttgtatttttttgtagagacgaggtttcgccaggttgcccaggctggtctctaactcctgggctcaagcgatccacccacctcagcttcccaaagtgctggggttacaggcccgagtcacagcgtccggctgaaagtgaagttgaatgagatgactcgtccaggccacatggcaatcagtggctgattgacgccaaagttgatttcattcttctcaatgggttcagagtccaaattctggaacctcagaagacgttgctattctggttccaagcaatgctggaaattgccaccccacccctcctggtggggcacttgacaccttgctgggtgctttcttacccgcttgccttactgtgttttcacaacaatcctggggtggaatgggagactcacagaggctgaggaatttactccaggtcacacagcaaggggaaaggctgggactcaaacctaaactggctttcaacctgggggctctttcttttcccttcctcctgtggtctgaatgcatctcccaaaatttacatattgaaacataatcgccaatgtgatagggcagagctctccaggatgggatgagggcccttttcaaagggcttgtaagcctggtttgccatctctcgcccttccaccttctgcagcgtgaggacacagcagtcttcccctccagaggacacagcaaggagggaccatcttggaagcagagagtggccctcacgacaccaaacctgctggcaccttgatctgggacttcccagcctctagaacagtacgaaatcagtttctatggtttctaaatgacccagtctgtggtattttgttacagcagcagaaatgagact

SEQ ID NO: 482267 - DNA, 1000 bp, Homo Sapiens
ttttttttttttttttttcgagacagattctcgctctgtcgcccaggctggagtgcagtggcgcgatctcggctcactgcaacctccacctcccaggttcaagtgattcttctgcctcagcctcccaagtagctgggattacaggcatgcaccaccacacccggctaatttttgtatttttagtagagatggggttttaccatgttggccaggctggtcgtgaactcctgacctcaggtgatctgcccacctccacctcccaaagctctgggattacaggcgtgagccaccatgcccggctcctttacccttattttaactggattgtcttatttctgagttgtgagagatttttatatattctagatagaagtcccttatcagataatctgcagtttttcccattctgtgggttgccttgtcactttcttgatagtgtctttgaagcacaggtttttaattttcatgaaatccaatttatctctcttttcttacttgtgctttgatgttatagctaagaatccactgccaaatccaaggtcatgaatatttattcctatgttctcttaacaattttatagtttcagcccttatatgtctttgatccatttgaattaatttttatatatggttaaattttgtaaaggttaaatttcattcttttgcatatgactgtctggttgcagcaccatttgttgaagggactattctttcctcaattgaatggtcttggcatctttgttgaaaatcagttgatgtggttttacttctgggctccctttccttttcattgatctatgtgtctatccttatgtcaataccacactgtcctaacattgctttatggtatgtttttaaatcaggtaatgtgagtctttgtactttcttctttttttaaaattgatgtggctattctggatctatggcaatcctgtatgaatcttagaatcaatttgtcaatttctacaaagaagtcagttcgggttcttacaaggattgt

SEQ ID NO: 482268 - DNA, 1000 bp, Homo Sapiens
tctccgatttccaccgagctgagccggagctggcaattcgctctgtggggttcccacaggaacatcccagtatcttatagggttatgtgctaaccgctgtgttgtaattctttgtaactgtctgtctctctcgctccagtctcatcacactataatttatgtacgacttaattatctgtttattctgcacttctcccaggaaatttccatgaagttgaggaagtgtctggacctgcagcattaagacgttaaaacaaacaaaccctggccaggcgcggtggctcacgcctgtaatcccagcactttgcgaggctgaggctggcggatcacttgaggtcaggagttcgaaaccagcctggccaacatagtgaaaccccgtctctactaaaaattcaaaaattaagccgggcgcggtggcttacgcccgtaatcccagcactttgggaggccgaggcagacgcatcacaaggtcaggagatcaagaccatcctggctaatacagtgaaaacccgtctctactaaaagtacaaaaaattagctgggcgcggtggtgggcacctgtagtcccagctactcgggaggctgaggcaggagaatggcgtgaacctgggaggcggagcttgcagtgagaccagatagcgtcactgcaagtccggcctgggcaaaagagcaagactccgtctcaaaaaaaaaaaaaaaaaaaaaaaaattagctgggcatggtggcgcacacctgtaatcccagctacttaggaggctgaggcaggagaatcgcttgaaaccgggaggcagcagtgagctgagatcatggcactgcactccaacctgggtggcagagcaggactctgtctcaaaaaaaaaaaaaaaaaagaaaagaaaaagaaagaaaatgtattcgaatctagtattcaggtgcacagagggtgaagaattgtagttcagatagagaagaaaacctgtaccttccacattgaccactgctcttcctctatttaaccat

SEQ ID NO: 482269 - DNA, 1000 bp, Homo Sapiens; identical to SEQ ID NO: 308901

SEQ ID NO: 482270 - DNA, 871 bp, Homo Sapiens
gggagtggagctccatccactgcctccctcctcaaggacccccactcacctgattttgggagtgggtagggtgtgtcataatgaccagcaaagaagttaaggatggggcccgtcacgttcagggcataatcgccgtggcccgccgcaatggcactgggccgggcccagatccggatctgcaaggtgtgaggaagaagcagaccaggggctcctgtttgatcctggggcaggtgggctgggtcccagggcccagtgggctggggggatccctgatgggccagggctggaggccaatcaagctaaacctagaggcctggtcagcagaggggaacgctactggggtctggaggctgtgggtcctagagaagggcctttggagaataacaatcatcatagccaccgtctgtctggtaaccggtgggtcaggaactcccttcatgaagagaaaccattgttttcatttttcaggtgcagaaatggagaaccagagaacaagacacttgcctgaaatcactcagaggtgggattccaaccctggcctaacaattcagaaactggcacagggatgaagagaacgggaagacccctcaagccggggccagcccacgtgaaggagagatgggcccagcctcataccaagacaccattggatgcctgcttctccacgtagtcgaactcactgacaatgaaggccagcaagtacgtggacatcttgggcgtggtgtggaactcagtgacattccagttggggtcttctggaagtggggtgctgggacctgggcagggagcatgtgtgtgtgaggacgtaccctcctgccccacaccccagcccagggtgcctgccccctggccctgtggccgcaggcagggc

SEQ ID NO: 482271 - DNA, 1000 bp, Homo Sapiens; identical to SEQ ID NO: 308905

SEQ ID NO: 482272 - DNA, 1000 bp, Homo Sapiens
tttttttttttttttttggtagaggtggggtctcactatgttacccaggatggtcttgaactgctctgctgggctcaagcaatcctcctgctcttttttgttattaacttttacttcataatgcgtttatttttgctttaaatattcagttatggtaagagtaatttatatttatccacataattaccatctctggtactctgtattcattttcagatttccatttggtatcatttcccttctgcctaaggacatcttttcacatttcttgtaatgcagatctgctgcggatgaattatctcgcttttacatgtctgggaaaagtctttatttcatcttcatttctgaaataaatttttagtaggtaatgaatcctagttgatagtttttgctatcagtacttaaaagattctgcaccactatcttctggcttcactgttcaatgagatgcaatgatgactcctgccatccttatctttgttcttccatatgtaatgtgctcttttccccccgtctggctatttttcagatttttttctttaccactgattttaagtgatttcattataatgtatcttataattttcttcatatttcttgtgctccgggtttgttgagcttcttggatgtgtgtatttttcatcaaatgtggaaattttcagcaatgacttctgctgttaatcccatccagtgcatttttcatgtcagacattgtagttttacttctgaaagtttgatttggatctgtttacacctttcatgtctctaacatgttttcttgattgcataaaataacggtcaaaataactgttttaatgtctctgtccactaattctattatctttgtcatttctggatctgctcctattaattatttgtttccttattgtgggtcatattttcttgcttctttatatgtatgggaatttctgagtagaaggctgggacttttacgtatcaggtatcagatattttgtattcctaaacacattcctgagct

SEQ ID NO: 482273 - DNA, 889 bp, Homo Sapiens; identical to SEQ ID NO: 308906

SEQ ID NO: 482274 - DNA, 1000 bp, Homo Sapiens
tttttttttttttttttttgggggtttctcaactttattggggacaggagaagggtaagtagacttgaaggttttttattttttaatgaaaaaacaatttatcctgtgtttgataccagatgagactgtaagggtcacatactccttaagcctacacatcaattccaggtgaagtgcttcaggcttggctcattctgacacctaaaaagggccctctaggccacggttgggaagactgtttttgccttagcgccgtgcaggtttgggcattatataaacttttacaggcttgctgaagggaatggtgccctcgatgctggtttccacctgtggtgacatctcaccaccctccatccaggggcattttggaatgcgagcactggagttgtaggccagcaacagcctcacttccacctggcatgcctctgtccaagcggggggggagagataaacctgagtgatgagccggtgccgccctgggccaggattccggaagtctgcaggcttggggtgaatcatctgagcctggccatctggatataagacctggaccttaacagtgttctgaggatcctgcacatgctccagggttgcatcaacatccagggcaaccaccaacccagaggtaaaccgcaaagggttgtctgactcgcccgctggctcgatgatggtggctgaggctttgtggatctgctctggaagcgggagatgcagaaaggcactctgtcgcagcatggtctgtagaattttgaccacttctgcaggtttggatgtcatgagtcggggcataaggtcaaggagtttgtccacaaagctgtcctgcaagtggggcaaatcagcgatgaaatacctctgaaaaaagtctacttcctgtaaaaatttttcacacatcccaaataaggggtcaagtcctcgtgtagttcgtgctgttactataagttgcaaagctttggcctgcagcctcatgtgatgtataatcaccacctgcttattctccaca

SEQ ID NO: 482275 - DNA, 1000 bp, Homo Sapiens
tttttttttttttttttttagaaataaatgtttttaatataatatttaaacatattaaaaaaaagcaacaattcaataaggatccttccattgttctttatacagatttaaatgctgtcacgtactttatcagttacatttataattaataaccttccaatcactgagtttagaaattgcagtatttactgagctaacctttctcacaaagtaaggcacaactacatgatcacaagtagtaaacacaatacaaataatgaacccaagaactaaatgagaaaatgttcatgcataagtatctacagaacttatgaatatatgatccagttcaaggaattacagaatgtcatatacacaactgcattgtgttacaataaatttattacttctacacagaaagaacttagtgacttctaattctattttatacaattttacataaatttagtaagtttatgcacaatattcacatctgcaacaataacaaattgatcattaaaattcaggctaagggcaattaagacacaataatgtgtggcacgttataattacagaataccattcatcaagctcatgtctaggaatactataatggtggcacatttaaatcttatggatcaaatcatccatggttttatagccaaagtgcatttttttaaaaaaactcctatagtcaaacaggtcatgaatatcaaaatatatgatcataatttgctctctacttaaaagctaaacatttttatgcaaatgtaaggttaaaaaaaagtggctttaaagttctcaaaactatataaaataatcataaagacttttttaagagagatgggaaaataacaaatttggcagttactatttaacattactgtcaggaaactattaaagtagataattccacattaagaggtagttgaacaaaatgttatttatacactgcattgaggtttttgtgtttgtttccctcattttttcttcaaaggaacaaatcctataccagcagctt

SEQ ID NO: 482276 - DNA, 1000 bp, Homo Sapiens; identical to SEQ ID NO: 120012

SEQ ID NO: 482277 - DNA, 1000 bp, Homo Sapiens
ttttttttttttttttttattttgaataataaattctttagtttatcagtacctcacggccttcaatgtgcattcttcagatagtttcagttacatatacattctttctcctgaacaataaattattcttaaaaaaaagaaaaggaaaagatacataattttaaagcaaagaaaaacaaaagaacatatatttttgacatttatcttaaacttatatgaaaacaactctatatgttagatgcttaaatataaataataaaggacattatgttatttacaatgttacatagtaagttgagagagtaaaaactgacattaactcaaaaagacagtaaatgatataagaaaacatccaagtaatatacaatatgtatttacaaaagaatatataatagaacttgtgatatgtggccatttccttctgcctacatttctcttcagtgtttcataggtcttcgcagatagaaatctctggctggtggaatgcagccagtattattaatacaagataagaccaggccttccttattttcaccagtgtgagccatgcgccctttaaccccaggccataaaaaggaacagttagtgagcaagttaccctggataaacttcacctctaacaagacagtcacactgaaacaagaaagtgatagcaggtttgggacacattcacctacacagaggaccattttgtagaaactagaatgctgtccaggcactcttgggggcaaaagtcacactaggcaggaagggaaagtaagatagaaagtgaatcttaggtgaaacaaaaggagttttgcatgtatttgcatgtattatgctccactgcatacacctcagtgggatacgattttagacccgggaaacaaagttgctgtcaaactcctgggcaatttctactaccttaaaacctaagatagctttccatatgctgggaacataagttcacactccgatcgccactgcactgtcggaatttattaacagaggtggtcaagag

SEQ ID NO: 482278 - DNA, 1000 bp, Homo Sapiens
ttttttttttttttttttgtaaagagtgggaggtctcactatgttggccaggctggtcttgagctcctgggctcaagtgatcctctcaccttggcctcccaaagtgctgagattataggcatgagccactgaacctggccccctcgtctcccctgcctccttgactgaggggtgcctcgtgtgatctgagccccgctccacacctgaacaagtggcattggactcatcttcactgttcccacagtcattgtccccgtcgcagagccagcggttggggatgcaccggttgttctcgcacttgaatcggtccgaggggcaggtgtgctgatggcagagggctggggcctcatcactgttgtccaggcaatcgttgtctccgtcacacttccagcgctcctggatgcagcggctgttggcacaggcaaactcgcctggctggcactggggtggaggcacgtaggatgggttcgctgtgggcaccacaggatcgtgagggggaaagtcagaccccggtcgtgggacaagtactaagccctttgcaccatttttgtttgttttactattttttaataatacaaagtaattttttctagtacaaaattcctcatgaaacaaattatctggatggaaactgcaattctttcccaagcaacaatagtgatgtttactctacttaatgcttactgtacttcagtgtgacctgagaatcaaatggtgtccaagagagcccatggcctctatacctctgtcaccaccgaacaggctctccccactccttccctgacttctccatgaacttccccttggaagtcatctccgggaaccccagggccctgccccggtccctggactttttatttcacagtttcatcggtcccaccagcagaagtgaagatggcaccacatccgcgcaggctccacccatcctgtccccagaacgtatgcctcaccatcactatctgtcttggcccattagcagctaaatcacgacgtcctttgt

SEQ ID NO: 482279 - DNA, 1000 bp, Homo Sapiens
tttttttttttttttttttgagatggagtctcgttctgtcaaccaggctggagtgcaatggcgtgatcttggctcactacaacctccacctcccaggttcaagcgattctcctgcctcggcctccccagtagctgggactacaggtgcccaccactgcgcccggctaatttttttgtatttttagtagaggtggggtttcgccgtattagccaggatggtctcgatctcctgacctcgtgatccacccgcctcggcctcccaaagtgctgggattccaggcgtgagccaccgcgcctggtatttctttcttttcttttcttctttttttttttttgagacgcagtctcgctctgtggcccaggctggagtgcagtggcgcgatctcggctcacggcaaactccacctcccgggttcacaccattctcctgcctcagcctcccgagtagctgggactacacgcgcccgccaccacgcccggctaattttctatatttttagtagagacggggtttcaaggatggtctcgatctcctgacctcgtgatctgcccgccttggcctcccaaagtgctgggattacaggcgtgagccaccgcgcccggccccacgcccgctatttctttaaatcagtcactctcctcaccaagcctcctggtctcccgaccacaagacctccctctccatgggcctccatcagaatggctggctccagtggcccaggatcacagctggctggccaggcaggcctctgtccccccaaggagccaggcacagagcaaggctcaggtcccccaggccctccaggacaagggagcatctaccccggctctcttaccaccgtggtccagctggggatgagcctgactgagttcttaacctcctcctctgtcacctccaccacgctgcagtgctcctcctccgaaggaaggggctcctccccgttcttggtcacccaagggtgcaactgtcggggccgggagggcagggagagggggagag

SEQ ID NO: 482280 - DNA, 1000 bp, Homo Sapiens; identical to SEQ ID NO: 308911

SEQ ID NO: 482281 - DNA, 1000 bp, Homo Sapiens
ttttttttttttttttttttttgagagggagtctcgctgtgtctcccaggctggagtacagtggcatgatctcagatcactgcaacctctgcctcctgggttccagtgattctcctgcctcagcccctcaagtagctgggattacaggcgcatgccaccaagccaagctaattttttgtatttttagtggagacagggtttcaccatgttggtcaggctggtctcaaactcctggcctcaagtgatctgcccgacttggcctcccaacgtactgggattaccaatgtgagccactgcgcctggcccagtctgctgtattttaaaacagctaaaatgaaagtaagagagagtgttaaggaaatcctgatgctcaaaaagcttggattttggttagcttgagctatggctgttagcctccaggataaacccaatggaaaattatgctgaaaaaaacagacagtatatctatggcctttgaccaccaggaacattgtccaaatggtgggtgacaaaaccaagacagtactggaagcaggggttatgtgtgaaggagttatcttgccttgtgaactggtattcatcgggttcctgaaaaacatttaagaaaatagattgtgagagtgactaacttgggagcagtatctttgattctgaatgttgcagaatgaagaagtctgcttggggttgatgcaggaaccttattactgaacaatcatggattgttgtacatgatccaaacacacaatagattgttcctaaagggacagctagtctggtggactgggtaaaagccactgtaaaatttgtttaccctgaaaagggaaatggtccttcccctcctttaaatgccaagtggcactcctccatagatgacaaagctggtaagctgcatatgcaaaccatgctggattaacttcatggtcatcaggatgtttgttcatccttaatatgccctttaaatcatggtaaatactgtgactgaaggggccccgctaggcag

SEQ ID NO: 482282 - DNA, 1000 bp, Homo Sapiens
cggaattaaaaaaatacagttttacaataatcatacttaaagtttgtaaagcacttgcctagacattgtgcgcttaacgccatcaacattgcccacacggcggggtcctcagcctcagcacccttgctgttttgaccaggatgatcctttgttgagggggactgtcctgtgcattgtagaatctttagcagcatctctggcctctacctgtgagatgctaatggcacccctccaagttgtgacgaccaaaactgtctccagacattgccaaatgtccactagggggcaaaatcctccccacttgacaaccatcaggataaggctgcttcccgcatcctgttcttccagacaaagaaactgaagagctagtgtctggtccaaggccacgtggacggtccaaggccacatggccgtggcctagcaccaggactggcccaggctggcctccagagcttgtcaaggtttgccctgggctccagacgagctctcccagggaagcagtgattcagcccatctgcacacactgtggccacacactcacatgaagtggggggtttgcttctgtcactctcattaggtgcttactcaggcttctgcactagtctcaaccctcctttccttgagtgagtgttccttcctctcctcgcctgactggctactcgccagaccttggagagaccctgggagatccctggggtcccggttccctatatagctcaggaagcctctccccgcttcctggtgttcccatgatcacggctgacgcagggaacaccagagtttactacccccagaccctgaggatggggccagccaaaacctccagcccttgacagtggctttgacagactgctcacccctctgccagcctcgtctgcctcctctttgcgttttcttcctgccgcatttggtctgtcctttgccagctctgtgtgccatcgccttgaccatctccactttgtttgtgtcctcagacagatgttgcacccatctgtgctgt

SEQ ID NO: 482283 - DNA, 1000 bp, Homo Sapiens; identical to SEQ ID NO: 308913

SEQ ID NO: 482284 - DNA, 1000 bp, Homo Sapiens; identical to SEQ ID NO: 308914

SEQ ID NO: 482285 - DNA, 1000 bp, Homo Sapiens
gatcatctctgtaaccttacataggctatttagcttccctgcaagcctgtgaagtagctaatattattagcttgactttacctataaggaaattgagacattgagaaactaagtgaattagtgcttataaaatgcttggaacattgcctggcatatagtaagtgctatataagtgtttgcttttttaaacaatgcctctcccttcctgcttctgtgagtacctggtagagtcacaaaggaaatgaaagctctgatttctggctccttggagcgtctcgtgcccctggcaggagactggcctatgaaggtggccgtgaagctggtgtttgctccgcccaacccctcccacccaggaccactcctcagcatctgtgttcttcagcaactaataccatacctgtgtctctcctcagtgacccacctttgggctttgttcacaggtgcagaaagctggaagtgatgctccagggagtttatgtctccccatcttgacccacaccaatacctgaggctcgttgctttgattcaagtccggacaagctctaaggttcagctcacactgggagtcacgctgcaggtgcaagcaagaatggggcttgaatcacacccctacttgatttctccgtctccctcctccttcctacttctcccaggagcaccatagaaaattcctggtacacttatattgcttttggggagcccagtcttacccaggcccagagtcagaggggacagtgagcaggggccatgcctctactctgcggttcacacacacttatgtgctggggctgctctctagacaaatgtttgataaataggacctaacttgaagccaagaatgctctggaatagagggtgtggatcttggtgcctggggcctctagaggacggaggccattctggaccaggttggccagggatggtgcccaggaggtcgggagattggaggggctgggtctgaaggctgtgtgggtttggtactaggtgaaagccacttgaa

SEQ ID NO: 482286 - DNA, 1000 bp, Homo Sapiens
ttggagtgctttgcataaccagccccgacagcaggaaccccttccaggaggagtgattgacatattttatttctaattgaagcttaatcagaaccagggatgagattcccatagtctctctccttctctccttcctggtttccctttaagattttaaggacagacaataagggatggaggcattccagggacccctgagaggagggagatgaggggagggcttagggaggaggttctgggaggaagagaagagatgggaactcagtcaagtgaaagagatgccaagaggactatctcctcttccctctttcagctgagaagctgagattcttttattgttgttgttttgattaggttatcttattggggtcaacttaggaccagttgagggctcatgtgttctatgggataagagaaaatacggatgcatggggactgctcctaggtttatgccaagtctcctctggtacctaaatatactgctttatcagtggggacagaaggtggctcatgcaaggaccattatccctgggatgtggcctgagaagctgaccttacttcacggtctccaccagagaaagacctagagacccacactcaggcatcttcaagccccgcctgcttctccataccatctggctgtgagcagatcccctgcctcctcttgggtgatgttcagtgtagtgaggccacctaacctctgctgtcacctccctctctgctgtgcccctgcctgggaagttcccctctcttgcttagctgagctggagttgcaaaggatcctgggatgcctgaatgcagacacctcacttttatgactaatgaaaggggtggagtggaatactgctgggagtttaagaagcgaaatgggagattctgacatgtaattttaatagtaaaatgaccaggttctgaggatcaagcctgtaatcccagtgctttgggaggctgaggtgggaggattgcttgaggccaggagttcaagatcagcctgagcaac

SEQ ID NO: 482287 - DNA, 1000 bp, Homo Sapiens
ttccccggggcttgcagcctaattatggttttcccctggtacacttgaaggtctgtggaacctttcaatccccactttgaaaaaagttgcagtttgcaccttttgaccaaggcaatggacagtttattgaggcttctaaaaagtaatgagtggctctcattatgttaaaatctcttttaattaaatattttgcattttacaaaggcgcctgcagtttctttcactttttaaatctaagagtataacctgtttcctttctgtaatactttagctcatacccagcagaatcaataggtgtaaaaaattaaattaaacttgtattttttaactatgaaacagttttgggggaaacacaaatgtatatatttatattacaaaaaaacattaaatgcctgtacaggtgtcttgatttcataatttacttcaaagatattgaattatcaatttaaatacaaaaatgctacattaaatatacagaataagatttaatacaaatccttttttaatttttcttttcggttggttaagacatttttttttttgtgtggagatgtttacatttttatgtcatccatctccataaactataaacttctgaataggaggggtagtttattttctctctctgtctctctctctcggtgatggaaaaataactgccaaggccatgtttttaataaattagaaaagtccgggaccgacgcagcccgcgttaaatgtcggacatacctttcttcaattcatagggagagtctttgcacaggtctagctgagactggctccgcaacattttcgggtctttagccaaagcgtccgctcggttcaacacggtctggtttaatccattgaaatgagaccccggaccggttgtggggcctggcccgggccccgggtggccatgaaggtgtccgaaggagccatagttcgtgtagccgggatagaagggcgcggtgtagtagagaggccgggacagcaccgtcccgcctggaaaaggacactg

SEQ ID NO: 482288 - DNA, 1000 bp, Homo Sapiens
tccccacaggactgcccccgcaatctgctgacatttaaccccaaccttgcaaatcctcagtaaatattaatatatcaactcaaacagggaccgttgttttattggttcacggagctcggagagattcgccacagcagtgaaaaataatgtgcacaactgaggaggaccggcttctttgatttcaccttctgctgcgcacatgagctgggagcatcaacaaaatggaaatgctgttactttgcacagctgtagagtgacacttcagatgccttcgcttccctttgtacagcctgctggaataatcccaaaaccacagtggcaagagattagaaaggaggcagaaggggagacagagagaggagaaatcacactttattatctggaagagtggaaattttaataatgcagaagacccaccctccaatctgatcagctttgccagaacagcgggcccaggatgggggtcaggaagggaaaagcggactccagcccctcctctcgtatcagccctgcctgccctccctgacccagggccacatatcccacgtgcatatctgagaatggaaatggcctgctttggttgagagtttgctaaaagaaaaaaaatttttaaaaattactggttgctttttaatgttgccatgtgtttgtgtgttaaggagggcagggggagagggaggtggaggcatttttggagggtttttcttttgagggggtagctcaaacttagatatcgcttattgacttatcttctcataaatactctgaaattcctaatggttgaatgcttgctgtgggccagggaaggctccaaattcttaggtgtaagaaagggggcttcgggtccacatttggctttcagatgtactgtgctgcagagtttaatgcgtgattaattttattcataaaaatgttaatcacttcattgtgagatctttttaacattcactgcagagagcaccttttttaatttctcttgcccaccatctcacagatgtat

SEQ ID NO: 482289 - DNA, 886 bp, Homo Sapiens
gaattctgcatcttcatgttaaaattccttatataacattcttatccaggaaagtcgaaaagatctggattctaaaaagaatcctttctcctcctccccagagtaatcttaggctctgaaatagtaggagtgggcgcttgaaaacacacccaaggagatgccttgagcaacttggccttttgtaggaaacttgtacagttagcagcccctgcaaatcaggcccagctgggctcctaacagactggggattttctgaaccctagggcttggagcagatcgtcaaacatttcctcaaacaatgaactatttccatccaacaaggaaggtttaaactgcctgaacgtagttcaattcattacttttttttttcaaagtttcaagtaagataatatttggaaaagttagcaacacaaatgaagtctgaaaatgactatgccagtcaacacactcctcttgaccaagaagtgactcaccccaaaagtgtcttcttctggtttgtgggtcacagtgataggaggtgtgggactcacttcgtcaactgaaaaccaaacacaaaaaggaggaggacagttagcttcccggctggggaggctcagccacagtccctgcccaactcccaagctcccttgagacttccccctgcagaacatcctctgaaagccaggctcttgcagtctgccttccccaggctttgcaggaccccccacccccacagaccaggttcctatctgaccatctggctggtgttacagttcaagcacaggctccataggaataaaggacattcagtcccattccctgccccaaccccagagaaaataacataacctgggcaacttgggccatgagctatagaacagaaaaaaagaaacatggtttgggatcc

SEQ ID NO: 482290 - DNA, 1000 bp, Homo Sapiens
ctgcagccttgacctcctgtgctcaatcaatcttcccacctcagcctcctgagtagctgggtttacagggttttctacccttctaatcctctctgggtatttccctatatatcagtgttctgaattttcaaggagttacagaggtttctgagaatatagcgaaagctatggactagttcggttcctagcgcaaacactccaacatttgcataccattcagaggatcacgtcctgtgaatgccattcatgtactcttcttcagtccctaagccccaaggtccccaaccacagacacaagctcatgcagagaatccatagaaattcatctctctacacatcccatagtctcaccagataacaccaacctgagtcctggctcagcaaactgataacttatcaaacctcgtatcatgcctccctacccacccccacccaacatcgccaaacatggaaaccccagctgggagtatatcttgaaattcaagtttctgttttggaacttggtacccagcctctcttgaaccatttggtcacatccatctctgagaccaggcaggtggatgctaattcaccatgttaacccctttcatgccagtccccttacccgagccttggcaaagagccatatcccaccaccccaccctgccacagtggagtggagcactgtatgtcatggaagccagccagcagatttagaaatcatgttgctcttggcatccactctgggactctgtgtagagctacgtgctgagatcccattgcatgggcagcttttcaatgccggagtctaccctacattcttgctgtgctgacgccttccaacacaacttcaaaaacaagaggaaaacgtgtctcaaactaggagtccctttacccacccgtaatgaaaataaaccaaagtccgtcttcatttgccctgaaatccaacttcctttccaaattatcctcattgcataagcccttctaagcaatgtttatcagcagtcaaagcaaaaccatg

SEQ ID NO: 482291 - DNA, 1000 bp, Homo Sapiens; identical to SEQ ID NO: 308918

SEQ ID NO: 482292 - DNA, 1000 bp, Homo Sapiens
ggatcataaacgattatctcagatttgtcccaagaatgcaaagttgttttaacatctaaaaatcaatgtattttaaagtacaattttattttgcatggttaatgtacaaaatatttccacctcccttgaaaaacagtattgtatctaaattggaatatattgctgagatatatagctgaaaacatacagttcacttaacaattaacatttaaacagataatattacacaagtagattcaatagacgtgaatatacatatatattacccaaatttttaatagtctaaagaatatattacagactaggcatagaggctcatgcctgtaatttcagcactttgggaggcaaaggcaggaggattccttgaggtcgggagattgagaccagcctgggcaacttagtgagaccctgtatctacaaaattaaaaaaaaaatagccacccatagctgtgtgtgcctgtagtcccagctcctttggatagcttgagcccaggaggttgaggctacagcacactgtggtcatgtcaccgtactccagtctacacacagaatgagatcctgtccaaaaaagaaagaatatattacagcattaaaaatacagaaggaagtattttgttttacttttaaatttaaaattcttctgattgttctacacagagaggcttaaaggtgaaaaagcaatcagcttaccaccaaataaaatgtgtctggcatgttcttgatgtctctccagctaaatggatggactatgacagtttaggttgaattaacacggtggcattcagtaatgagatttttattatcaaatagaactgactgagaaatgttagtttgtgagatgtcattttgtgatggcataattttttcagagctactcattaaaacattctgaggtgtaattgaaaagtttagtttccttcttaccacagcatctgaaatttcgtcttttttgttagtattaactgctactccatcagcaagaagaagtaaactcattatt

SEQ ID NO: 482293 - DNA, 1000 bp, Homo Sapiens; identical to SEQ ID NO: 308920

SEQ ID NO: 482294 - DNA, 1000 bp, Homo Sapiens
gatccaggccagagtgctgacagagcccaggagacctgcctcggaataactccaaatgcaccaagagagccccagaaaggccggcacggccccatgaggttccctatcactccccgcactgcaacagcctcccccagatcacggccctctctggcctgaccaacaatcttgccaggtgccttgtgctcactctgcacaggtacaagtagtcacggcctctaggggcccagccaggagccccactcaggatgtctccttccacagccacccaataaacccagagacctgccatgggcctggctctgagctgcatggcccccggccacagtcctgggtatcctcgaagctgcccagaggcggctttctcctctctccgctgagtccttcctccctctgtgactttcctacaatatttccaggtgtccctgtcttaccattccccagtgtaccagataaaatcttccataaacctctctctccagttccatgaccgtgtgctgccttggaagccagcagaacacaatggcctgggcgctcgaggtgacccctctgagcctctgtcctctccccagtaggccaggcatgggccctatccctgacacctggtctaccacccaggcgcctagcacccagcggctactcaacaggatgtggcgaccccggccgcgctgtgtcagcttcccagaatccaagtcagaggcgctcaagccagactttaagatgacttcacaaggccagggagggcacactggagactcgggccttcctgatcgcgcgtgctctgagcgctccaggccacctgctggtgccaaccctctaaccctcctgacaggtcagtgcctgtcccccacccttcacaagaggaccaggacaggccccgctcccaaaggaggacactgtccatcacatccaccatgtagggtccgcgtgccaaacccaccaggatccagagagggactccccacaccccaccacacgtatgcgcttcctcctgcatgaa

SEQ ID NO: 482295 - DNA, 1000 bp, Homo Sapiens; identical to SEQ ID NO: 308921

SEQ ID NO: 482296 - DNA, 1000 bp, Homo Sapiens
ttttttttttttttgtgtaagttccatgttattttaaaattcctattggctaataaaagcatttgcactatagaaccagagacatctagaaaagcacatgatagatttttttgcaagcagatgcctgaaacattacatttacctcatggcacaatgagacagtcaccaaatccaatgtctgcattagaacgatacagctactattacagttgcaaaaccattaatcagcttatccacatatgttcagctgggtccccacgtgacaaaatctaaaggaagaacagcatctaactgcacctgtgctccattccctcacagataggaactgtgacattttggctctttccatgttgtgctgctcttcacgagaggccagggtcatacgatactgaagaccatggacaggtactgttcgtacgacacctgaatccagccgtcctgatccgtgtcgtaacgtctgaatatatccgtcaacctctgcaggacgatgcagccctggatgaagtcgtcgaaggcgatctgcccccgtccctgcctgtcaaactttcgaatgaggatgtcgtggaactggtcagagagccggtagccgaaacctgagagggcctgcttcagctcgttcttatcgatcatcccggagttgtcccggtcgtacgtgcggaagacgttctgccagtccgtgatgtacttccacacacccgtgaactcgctgaagttcacgccggccttgttctcacggtcaaacatggatatgatcgacctgacagtcactggattaaagggagtccacgtgccgttggagagagcttgctgaagctcggtgtctgatatcactccactcctgtctttatcgaccctctggaaaacgttccacaggaagctctggtccggcagcgccgcgcctgcagcaggcccagggccggccccagggccggggcggtaagagtaggcggccatgggccaaggcacgcggctgggctgaggcgcctgcagcgacgagaga

SEQ ID NO: 482297 - DNA, 1000 bp, Homo Sapiens; identical to SEQ ID NO: 308922

SEQ ID NO: 482298 - DNA, 1000 bp, Homo Sapiens
tttttgacaagtctcactctgtcagtcacccaggctggagtgcggtggcccaatctcggctcactgcaacctttgccttccaggttcaagccattctcatgcctcagcctcctgagtagctgggattacaagcacacaccaccatgcctggctaattattatatttttaatagagacggggtttcgccatgttggccaggctggtttcaaactcctgacctcaactgatctgcccacctcggcctcccaaagtgttgggattacaggtgtgagccaccgcacctggattcccagccctctccatggcaaatgaacaggcaaagccccttgttgcccatttaagtccagtagcattttactttctacctaaacaaagaggataggcatcggcatttcccctttcttattggaagatactgaacacagttcctaacctgcatctgttggcagccacagctgaccacacaatcccagtcccctcctccccttctctgccaaagcacaaacctcaggggaaaccagtgaagctcatcagtagatgaagcctcagctttctacattggtgcccctcatgggtgagacatctgcaagccctgggcagttaaggagaccatctgaagagaatccgtcttcactttagcgtttacagttatcaaattgttggattgataatagaaaggaaggtggtttttaaccacataactaacttcaaagtattttaactctttctttaaaattatttttttcatggattacaatgatcccagagggaaattgaagtgaaaatgttacccaagatttttctttaggccaccgagttgattagagggtcactgctccatcgttgcttcaggcaaaagagtctccatcttcattccaaatgaggtgagtgtttgagaggccttttctgccctcgcatgcctgacgtgggacaggagcatcaggaggttagccaggcgcatggattgctgctgggaggagatgccgctcttggcaatca

SEQ ID NO: 482299 - DNA, 391 bp, Homo Sapiens
aacattttattagagatcttatggtagtatctcagttcctaccacagctttttaaaggatgagacttgcatttcactaagtgacatatataatatttttctacagttttgaaactgaattaaaggaaggtggtgtattacaatgtgtagtgaggtataaagggctagttcattctgtcccaattagaacttagaataaaataacacttttttcatgagacttacctcatttttgttaggctatggatgttttgtccagttcatctgtcccttggattaagtagatattgctcaaggtgcaggcaaaagtgcttcaaggacagagattatatagcaagttgattttctaggaattctttgaattcatttgtgtaatagctagaacacactcc

SEQ ID NO: 482300 - DNA, 1000 bp, Homo Sapiens
catcgtgatgtcttatttaaggggaacgtgtgggctatttaggctttatgaccctgaagtaggaaccagatgtcggatacagttcactttagctacccccaagtgttatgggcccggagcgaggagagtagcactcttgtgcgggatattgatttcacggaggatggtggccaagggacccctatctgaggggggtcatccatggggacgagaagggatttgactgtaatgtgctatgtacggtaaatggctttatgtactatgtactgttaagggtgggtaggtttgttgatatcctagtgggtgaggggtggctttggagttgcagttgatgtgtgatagttgagggtcgattgctgtacttgcttgtaagcatggggggggggttttgatgtgggttgggtttttatgtactacaggtggtcaagtatttatggtaccgtacaatattcatggtggctggcagtaatgtacgaaatacatagcggttgttgatgggtgagtcaatacttgggtggtacccaaatctgcttccccatgaaagaacagagaatagtttaaattagaatcttagctttgggtgctaatggtggagttaaagactttttctctgatttgtccttggaaaaaggttttcatctccggtttacaagactggtgtattagtttatactacaaggacaggcccatttgagtattttgttttcaattagggagatagttggtattaggattaggattgttgtgaagtatagtacggatgctacttgtccaatgatggtaaaagggtagcttactggttgtcctccgattcaggttagaatgaggaggtctgcggctaggagtcaataaagtgattggcttagtgggcgaaatattatgctttgttgtttggatatatggaggatggggattattgctaggatgaggatggatagtaatagggcaaggacgcctcctagtttgttagggacggatcggagaattgtgtaggcgaata

SEQ ID NO: 482301 - DNA, 1000 bp, Homo Sapiens; identical to SEQ ID NO: 120013

SEQ ID NO: 482302 - DNA, 1000 bp, Homo Sapiens
ataacctttatctgccacatgtagcaaatattttctctggctcttccccccgccccctcctcttttttttttttttgagacggagtctcgctctgtcgctcaggctggagtgcaatggtgtgatctcggctcaccgcaacctccgcctcccgggttcaagccatcctcctgcctcagcctcctgaagttgggattacaggcgcccggcaccacacccagctaatttttatttttatttttattttttctgagacggagtctcactctgtcgcccaggctggagtgcagtggcgcaatcttggctcactgcaggctccgctccggggttcacgccattctcctgccgcagcctcccgagtagctgggaatgcaggcgcccgccaccacccccagctatttttttgtatttttagtagagacggggtttcacagtgttagccaggatggtctcgatctcctgacctcgtgatccgcccgcctcggcctcccggagtgctgggattacaggcgtgagccaccgcgcccggcctgtccacttttcctcagtgtcaccttgagaataccatttctgaggaaaagcatctctacatgtgcctagaagactggaacagctacgcatcaaatgttaggggtgtggatgaggcctgcctctaccccgtgtgtgtgtgtgtgtgtgtgtgtgtgtgtgtgtgtgtgaaagcatggatagattttagtttatttatttatttatttatttattttttgagacggagttttgctcttgttgcccaggctggagtgcaatggcgtgatctcagctcacctcaacctccacctcccgggttcaagcgattctcctgcctcagccttcctagtagctaggattacaggcatgcgccaccacacccagctaattttgtatttttagtataactggggtttctccatattggtcaggctggtctcaaactcccgacctcaggtgatcctctcgcctcagcctcccaaagtactggga

SEQ ID NO: 482303 - DNA, 1000 bp, Homo Sapiens
gatcacagatgacagcaaaccccaggccaccaggagggcggggcaggggatttagtggccagcccctgaatcgggaggtacagaagaggtggcctgactgtagaatcagaggcacacctagaagtctccgagagcagctgtgtgtccggggctgacccgcgctgtcttctctccccagcaatggcagatgagtctggggaccagcgaagaccaccagcacttcacctgcaccatctggaggtgagactcggggtggggatggcatttccggctgccgttggcctgccctgtggcctcaggagctgctttggaaggcagggaacgagggctgcacccctggaggggaagacagaccagcagggagactcatgcacgtgcaggtggggggtggcagggtcgctggggtgggagtgctccccaaggaagtgcactgatgcagagactgagaaggtctgggggagacggggggagcctgtgcggggcaaggtcccaggaaaaggagaagcagctcagagggtgcggagcgtggaccagggcccaggaaggccccaaggggctccaccctcccctaagggtgagacgaactcaccaaagggctttttggcaatttttttttttttttttttgagatggagtctccatcttttgcccgggctgtagtgcagtggagcaatcttggctcactgcagcctccgcctcctgggttcaagcgattctcctccctcagcctcctgagtagctgggattacaggcgtgtgccaccatgcctgaccctttttggcaatgtttaaaaactgagataaaattccataaagcacagcattttaagctcacaattcagctgcatggagtactttctcagaggtgtgcagccagacctctgcttccagaacattttcatcccctgaaaataaactctgttcccatcagagtcattctccttcccagcacatggcagccacgcatccccctcctgtctctgtggatgggcgtgtcctgg

SEQ ID NO: 482304 - DNA, 1000 bp, Homo Sapiens
gatccctccctcaggccctgtgctttggcctgtaatcccagcagtttgggaggccgaggcaagtggacaacttgaggtcaggagtttgagaccagcctggccaacatggtgaaaccccaaatctactaaaaatacaaaaattagccaggcatggtggtgtgcacctgtcatcctagctcccggattcttgggaggctgaggtaggaggattgcttgaacccgggaggcggaggctgcagtgagctgagattgcgccactgtactccagcctgggtgacacagggagactccatctcaaaagaaaaaaaagaaaggccccgtgctttttaaagctctgctgctggccacatgccgtggctcacacctgtaatgccaacacttcgggaggccaagtcaagaggatcacttgagcccaggagtttgagactagtctgggcaacatagagaccccatgcctcactgtccaagtctctacaaaaagaaaaatgtaaaacttagcctggtgtaatggggcctgcctatagtcccaagtacttaggaggctgaggcaggaggatcgcctgagcctcggagttcaaggctacagtgggctatgatcatgctactgcaccccagtctgggtgacagagcaagaccctgtctctaaaaggggggtgggggggagggggaagaaaagataaaagctcgctattgtggtctggaaagtcttaatacttttctaacaagagaccccacaatttcatttgcgtgggtcctggatcccatcctgctgggggatggaggaaggagcgggggcggagtcaggcccaccgtggcccgccctgctcttcctagcagataattttgccctgacctttcccaggctgggacagaacaacctgccttctcttgccccaagccagcctgcactctgagcactcagggtattaaaaggacaagctgtgaagccatcaactgcccggtcccccggagtctgggaaaaaaatgccccctgcgccca

SEQ ID NO: 482305 - DNA, 1000 bp, Homo Sapiens; identical to SEQ ID NO: 308928

SEQ ID NO: 482306 - DNA, 1000 bp, Homo Sapiens
aagtgaagatgttgcccatttcaaatactgaataagatcttctctctcactcttctttttaagaccagaaaaggtcatgttagttccagggatatatttctttcttttttttttttttgagatggagttttgctcttgttgcccaagctggagtgcaatggcgcgatctcagctcactgcaacctccgcctcccaggttcaagccattctcctgcctcagcctcccaagtagctgggattacaggcatgcaccaacatgcctagcaatttttttgtatttttagtagagatggggtttcaccatgttagccaggctggtcttgaactcctaacctcaggtgatccgccctcctcggcctccaaggtgctgggattacaggtgtgagccaccacgtacagtcccagggatatatttctttgggttctccaaatattccatcagagtctcttctccccatacaatacctacaaaggtgaaggtaagttttaagtttgtgtagttacatttgtagggctcactttctgatctgacccacatatgtgaacaaaagattaatcttggactcagtagggaggctattttaactgagacttatagattctgacctataagaaatttccaaaatgtgtctccactccttggcttctctgtagaaatccatactgtagaaacagtcgcatactgtttagggtcttctatggtaaaccaatgaactaccaccaaagacatgttatgcttaagcagttcctcatcctccaagaatcagagtgagttccttctagaaaaggtcttagagatcatgcaatccaatctctaattttgtagattagtaaatgatggtccaaagcttgtcctaagattacaaagctacctacagtcaagaatttatgactactaactcatatttgcatgttttttctacctatcataccaagctgcctctatccagatctccatcaaaatccatgatttcaaaaatccagttttaagacaatagag

SEQ ID NO: 482307 - DNA, 1000 bp, Homo Sapiens; identical to SEQ ID NO: 308929

SEQ ID NO: 482308 - DNA, 996 bp, Homo Sapiens
ttatttcacatttatacccatgaatctgtgacacaactcttcaaaatgttgtggatcagctacccacaagacagggagaataagatacgactgtacactgtgttccagacattaagaatttaatcctcaaactcacccaaatgaatacagttggaataatggctacccacttctgggtaaaataaaatgcattgtaaaccttaactttttcgttaaaatgtaagtatagtattaaccgtcattgttcatgctatcttttaacctcattgcagtgaagagaatagtggatgatatgcagaccatcactctcctgccttttcagtaaaattataaaggatgatttattgaatgttcttggagaagcaaattaattttcacaacttttccaggtttctcattaccaagtgatcacttcttataaagaaatagaagacagttctgctgaattaaaacatgatgtatcaattggtctcaaatttctgtcttctgttttaactgaggccttttttgagaatactcaagatatgtattgtctgtttttgttttgttttgtttaagtaggaactatggagccagaaaaaggtgccttgctgctgagttaaagttaacagaggctatactggtcttacagaagatccagggggcagattggccaggaaagaagggccatggtcaagagccattaaagtgttcccctcagggtgccttaataacagccgaggcattagagggattccctctagagtcatcagttttgattatttaagtcttttttccccctgttgacatatagagagacacaaagctagggaaccaataattctactctagttactgtaagtgctggtataaaatcaccagtctcaaaagccacttgtaaatacaggacccatctgactaaagagtgttcctcttgggaaatatggtgtattatcaaaagggggaattttgtgaactgatactatagtttaaactcaggttaccggttcttccgaa

SEQ ID NO: 482309 - DNA, 997 bp, Homo Sapiens
gaaacagaacaagatgtctgagcatctcagcagtccagcccctgctatttgagtcacgctagccatggcaccagggagatgagaagacacccgccaatgtccccatctttggccatcactagattgcatcctcctgagtgcccctgaaccacattcatttggctgagagactgagggcgattgcagagactgacagttagtaaattataattatggttttaagccactaagttttagataattctgaaaagcactttagactcctagaaaaactgtgtcgtctactgacttcattgcagagagctgtaaaggccaacatcatgaatgctaataccctggaaaagtcaaatcatcgagactcttctaagcacaacagatctttaatgtcccttcgctatggctggagaataatctaacatgtatctgatagagttgttggaaagcctctgttcacatctctcagcctggtatgggtcaactctggtctgctttaattctaggcaactgcagcagttcaccttccattttaggtcgtggcctacactgattttttgatcactgactgtgtctttgtctgtgtgtgtatgttttgtgtgttatcatattttatctgaggaggctaaataatagtactatagttttgtaaacagaaaacattccaggaagtcagtattgcttataaactgagctttaaaatagatatgaaattagacatggcaagatgccatgtctactatcataccaaagctagccaagcttggtggcccatggatattatcccagctacttggaaggctgatgcaggagaatccattgaatcctggtgatggagtttgcagtaaagtgagatcacaccactgtgctccagcctgggcagcacagcgagactctgtctcagaaataaaaagagaataaaataataaaataggagagattactgaagagacaaatgcataaaactgggtgggcattgtggctcacgcctggatcccagcat

SEQ ID NO: 482310 - DNA, 1000 bp, Homo Sapiens
gtcgactcgatccctctggtaatttatagatgggtatgctactgacaggaagggaagtcagtggctgattgaaaagcccagggtttgtgacccagtctctcaaagccttctgcagccttctaacatgaaggggcttgctagccatgcccacgagtgccatgatttccaaaaactcctcttctcctgcttcacagagttgctggacatcatcaccaccttgttggataaaggcatcaaaataagaaagtagattggctttttgtaatattctatacagctgcaactcccccagggtcctgggtaaggccgcagccattactctggatgggtttaacctgccaaaaaaaaaaaaaaaagtaaaaactcatcatacttgcttcaaactccttacaccaaataggttacactacaggttttaagaacaaaaacgagaagcatctgcatcgtgactgcctgtgaaggcagcattctctctacatactttatctcattctgaactcctaaaaaccttataggtcagtaactaaactgacgtactttcccaaaagagaataaatggtaagcaggaatctggaggttcaaaccaaggatcaaaccaaaggttccatgtcccgtatttttggctatatactttgctactgccaaggtttggacgcaggtggagtgaaagatagtcaaatttagcaggaggtaagaagcagagtatgctaaccatttgctgaatacttactttgtgccaggcaatacaataaacactttacattacgtatgtctaattctcacaatggccctgtgacacaggtacagttattcccattttatagagaaaaaatgagcaagatgagtctggcaggcagaggaagatagatttcagtatgaattggaggtgagaaatagaaggtgttaatttaggaatcaagaaagaagaggtagagaaaagtcaaacaagtaactgacaagacttggtgatcacttagatctaagtgaggaaggaagttac

SEQ ID NO: 482311 - DNA, 270 bp, Homo Sapiens
ggggcaggagggcaggaggctgggcatgcgcttcggcagggctggctcatgtactgatgacagagagtcccaggagatgaagccacaaaggtgggcaggcccggggtcatcaagcgccccaatgccaggccgagaagtgtggtcgctgaggagctgggaagggtgttgagcaaggaagggccaatgtgggtggtctacgtggagtcaggaggacacaaatggaattagggaaacaggagggagttgtgaatgccaatgggacgggaattc

SEQ ID NO: 482312 - DNA, 1000 bp, Homo Sapiens
gcctcacccactttcaacagctctggctactggcagagccagcctcatgtcctaacgctcaagttttaagtacaccctggaaaccaaaccaagcagggctatcaagtcaggaacaaccttctggggaaaacagagcagtgaggaagaaaccgaggagcccactatcaacaggaaattaattttatttttaaatccaaggggccagaacaaatgagacacctacccttggaggacaaactcaagtggccaaggttgggggaggggatgacagcaaggggctgggcaggaacgcgtccaaacacagcagatggagaggacgacctcttcactccggcgcagcctccatcaaatacccattctccggagccaggtagccgtcgccgccctcagactccatgtacatgtctcggctgtcgttgcccagaccctccagcccgttgtcctggccaccgcccccacctcgggcctcatccctgccccgctcactgccccgctccccccgtttgtgctcgcggtcacggtcacggtcacgatcccggtcccggcgccgctcgcgctcgctccggtggctccgccgtcgctcccggtcacgatcccggcccttttcctctggaccgtcagggccgtcaggcccgagctcccctggaggcccatcatcagggggcgcgtcacccgcctcggagggctccgccatgtcgccaccgccgccacgcagctcctccttgcgctcccgctcccgccgggcccgctcccgactccggctgcttcgccgcttccggtcccggtccttgtccttgctccgctccctggagcgcctccgctcctccttgtcgcgactccgtgagcgcctccgccggtcccgggagcgggagcgtcgccgttctcgctccttgtctcgctcccggctccgctctctgcgctcccgctcacggtcccggtcccggtccctgtgcggaagcggggaggggccgggcctggatgaggtgggcagacctgtgtg

SEQ ID NO: 482313 - DNA, 344 bp, Homo Sapiens
aattcccagtaacttccttgttttggttgtgttcaactcacagagttgaactttcatttacacagagcagatttgaaacactctttttgtggaatttgcaaatgtagatttcaagcgctttgaggccaaaggcagaaaaggaaatatcttcgtttcaaaactagacagaatcattctcagaaactgctctgcgatgtgtgcgttcaactctcacagtttaacttttcttttcattcagcagtttggaaacactctgtttgtaaagtctgcacgtggataacttgaccacttagaggccttcgttggaaacgggtatttttcatgtaagcctagacagaagaatt

SEQ ID NO: 482314 - DNA, 647 bp, Homo Sapiens
aggatgattcaactttatgatttttcaactttttgatggtataaaagcgatacataatcagtacaaaccatatacataccaccatttttcagtacagtactcattacatgtgtcaacactttattataagataggttttatgttagatgataacaccagcatcttgctcaataaattgaagccagctttttcaacagagaacattattagaatgaaactagatgcaagaacaggaaagtaaacacctgtgtcatgttcaacaagactgaactacggagcaaagaatcacacagtgttgcaagatcttgaactgactagatgataggattacaaaaaccacacagctattgctggaaaattatgtcatgcagagaacagactggcacgattacatatgtgggtttgtcctacacaaatcagacctttaagtgaaacaagtctatccaaccatcttcccataaaacctagtttctatggaaaacaatcaattaagctaaacccccacattttagatgtatattcatttatagaagcccaaaaggacagtggggttacaaataattttatattttagatgctttcataatttaaaaagttaacattacaatttgtgttactaaaatgcaaaaacaggattggcatgctgc

SEQ ID NO: 482315 - DNA, 1000 bp, Homo Sapiens
catgttatctgtccctggcaacttctacaccttgtgatttgtcaccaaccaggtgggaagggccgggtggcaaggagagggtctctatgctctgagatgatgaatagccagcccctgttctgagcaagctggtaccgtcttgccagatgagcctgaaggggcaccgctgaggctcctggcctacgtatgtggggaatttgtaggggatctagcgaggatgcccagcatccaggtctcaatgtctaaaagccaaatcccacttaaggagcagagttggattagtgctgagacagtgaactggtagtttcagcagttctaagcattaagcaacaccccccgccccggtctccatacggagggtctcacagatgtatgagtcacccagctgacttggggaaggttggtgggagggccaacagctaaatgaaagctactttttcttctaaacctctttggattctggaaatagactgattatctcttcattcccgggcattgccaggacaggaagagatttgattaaactcagcaggcagctaatgcgaccttgcgggtggggactaaacaaaaaggtcaaggagaaatgtcaacctcaagatgaacctggtgttatgcaagccaagctggatctgtccctctcctccacccggtcctactgattgatggcttcaggagtctgttgatcccctcagtgtctctggaacctgtctgcatcctcccatccccagcacgcctttgcttctcaggaccggagtgattccccactgtctgactacatctatttcttttcttttttttgttttgttttttgttttgagatggagtcttgctctgtctcccaggctgaagtgcagtggtgcagtctcagcttgctgaaacttctgcctcccaggctgaagtgcagtggtgcagtctcagcttgctgaaacttctgcctcccaggttcaagtgattctcttgcctcagcctccagagtagctgggactacaggcgcctacca

SEQ ID NO: 482316 - DNA, 664 bp, Homo Sapiens
ttttttttttaggatggggtgtgataggtgtggatatggccctggggaaggggtatctgtgtgagatacagatatagagaaagcagtgagctgtgggttaaagccacagaggtgaatgaacagggactgacacctgccttctactcggggcactttctaccacactagggcatcccacacgccccctgttctattactcacatgtgaaaactgaggccatgggaggggaagacatgcctgaagtcacctgggggcagagtcacctaggacttctgacagtaggcagagaaaaatccacaacagctattcttaagatccagctaacatttggatgggggatgcctagagggctctgatgccttgcgctcccctggctcctggcccagggtaaggttcccactggtgtccacaggccaggtacccatgtactgctgaaaaaggcaaggggtggggctggtggcaggaacaatgttcccctggagaggtgtaaagatacccccagcaggttccactgactgccagcaggcacactggtgcccatgaggacatctgccccccactctgccttacctgaacatctctgtcacttctcccttggccagcgccaccaggacaggaaaaccgatgcaggcggggaccaggtataggagggcaggctatgagc

SEQ ID NO: 482317 - DNA, 515 bp, Homo Sapiens
ttttttttttaggatggggtgtgctatgttgctcaggctggacttgaactcccgggctcaagcgatcctctgccccagcctccgaatagctagggctacaggcgtgagtcactgtacctgtcttcattttggtttattttatttatttatttatttagttagttatctatttagagatggagttttgcttttgttgcccaggctgagtgcaatggtgtgatctccactcaccacaacctccgcctcctgggttcaagtgattctctcgcctcagcctcccgagtagctgggactataggcaggcgccactactaattttgtattttcagtagggacggggtttcttcatgttggtcaggctggtctcgaactcccaacctcaggtgatctgcccaccttggcctcccgaagtgctgggattacaggcgtgagccactgtgcttggcctttttttttttttttaattaaaacaaagctgtttttttaattaaacgtactttataggccgggtggcc

SEQ ID NO: 482318 - DNA, 653 bp, Homo Sapiens
ttttttttttaaaaacacaccagcctgggctgaggcatccactgaaatgccttctatttccaccaacagttcccggacttgagtcctcaagccagtgctgaggcaggtgggaagagagagggcccaggtaatgatagctctgtcagtgagacaaagtgagaaagtttcatttagcccaacaattatggtaatttgaggaaagaacacagggtttaaagccatgcagacttgagttggaatctgcttctatcacttaagcgctgagtggccttggctaaaatacttattctccctaaaataacccaactgatttgagaagcaaggtaggtagtgcacagggcacgaagcagtggctggctgacaggcgcttgaaagcaaggatttttgccgcttttgtttactgctgttcacctacccccttgttgccaaggcgacatcgtaaacactccattatttgttgaatgaacgaatgaattggctattttctaccacgaacttaagtgtccatactaattacatgaactaatttttaaagaaacacttcttaaaatcacattttacctgcaagatattattgcttgtaagaaatgccattgatttcatgtttttaatgaccacattaaatatacacattatttgaaaatcatcccaat

SEQ ID NO: 482319 - DNA, 613 bp, Homo Sapiens
ttttttttttagcgttaatgatcccgcctctttattacatcccttatgcatacagaattcacactgatttcagttaaaagtcaaagtggcatgcaagtagggcaagggtggcccctacataaatatagacatagccatttgttgagaaatttaagtgttcaaaacataaccaagaacacttatcaggtattgaaaagctagaggccagccacttctggttcttagttccccttgtaactccttataattttcaaatgaggaagtatcagtgtattctcccaaaccactctaaattcattagtaacattttctaccatccttctgcaaacattttacatacatcatgagaaacaaaagaaagtttcatatataactacgactccccaaaccaattgctactcactcttaattatactttgtttatggcaagtagaagttacagcccttaggattatctgatgagatactttctagtcttctcataatgtccctcaattacatgaagcatttagaattaatcattacaagtaaaaagagatagctgctatcagaggatgtattttatttaagaaagtccattttaataaaagaagaaacttttaaaagtaatttt

SEQ ID NO: 482320 - DNA, 625 bp, Homo Sapiens
ctgtctcctttagctcttaaaaacttgggtgaacaaaaagattatcataagaaatgcaaactgccacacgagtccctgctgtgacttgggtgccatcagtgtagagctatgtgtgtccacaccagtcgtgaaaggcccatggccatcatgcctgatgctgataggacaaggcagtggaatagccacaaacgtgaatttaccatctggctgttgtaaaaatcattgtctggaggacctagagagaaagtgttgcataacttccgggctctcacttacgaatgaccttgaagctgctgctgagggatggcaatgacttgtcccttctctgctttcccttggcaaaggtttagtaacagctgtatttaggtgacaatcttcagatgatctacgtggccctgagcagcctagatcaagggctactgcctgccacaggcttttcctgcgtacctccttgaatgtgggaaggattcacagaggaagatcttcaaaatacggaggtggcaagcattgttgtgtagccctaagtcaaatagttctccactgtaagaaaaactcaaaatatttccagataaatttagagctgagggattggggaagtggaaaaaaaaaaaaaaaaaaaagatct

SEQ ID NO: 482321 - DNA, 557 bp, Homo Sapiens
ttttttttttaattgcattagcagtgatttaatttttttagatgctaaaccttatgggtgaaagtggattaaatgtagccaaatgcaacatcaaaatcttcaggcacaaaaacccattaactttttaatactctcagaagatgaacctaatttcaaatgaaagctgcctccagaatatattgttaagcatatcctagatataattcattctagcaaacattctgtagaaattcacataacattttactgtactaaaagtaaattgcccatgtaacaaaaactatcttttcataacttcaaatgaattttaaaggatgactgaccgtccttggaagagaaacagtaaacaaataaggtttatagcaatgatgtatgagttagaaattgcagttccaggccgggcgcggtggctcacacctgtaatcccagcactctgggaggcagaggcaggcagatcacgaggtcaggaggttgagaccatcccggccaacacagtgaaaccccgactctaccaaaaatccaaaaaaaaaaaaaaaattagtgggtcatggtggcgg

SEQ ID NO: 482322 - DNA, 365 bp, Homo Sapiens
tgagtgcatctgaggaactgcattttaaacttaaaatttaattttaattggaaatagccacatgaggctagtaactgtaaagaactgtgacaagcctgagatgtctccctatttgcaagctgacaaattagcctgctgacagatgctggcagaagacaggagcttcctggatcagagacaagggacttcattactcaaagcacagcgggcagccagcttgagtttcatacttgcgtcatttctgcttgcctctaagtcttatggggttttgtgcaaaagcatttaccattatctgcactgttttgtatgatgcacaagctttcagagagggactatatatttcactcctcattgtatctccagtt

SEQ ID NO: 482323 - DNA, 341 bp, Homo Sapiens
tggtcaattctgggcccacagacattttttacttattttttaaattcatttcaaattcatgaatctgtggacattttctatatagagtattgttaattttgacatcaacagttaatagtccactttacatcatatggctgcctctcaaaaattgaatggcacgtctaccatgaaacagtattgtaccatatgtacattatgatagctatgatagctagtctatgctttctgactccccattcctagtgtagtgtattttctgagtgacaaaattctcttatttatgtccaacccaaatgactcactaatgcttgagatctacatatttagttttatgttgg

SEQ ID NO: 482324 - DNA, 1000 bp, Homo Sapiens
ctatcaagatatttaaagaaaaaaaaattgtatcaactttctacaatctctttcagaagacagaagcagagggaatacttcctaaatcattcaactaggccagcattaccttaataccggaactagaaaatgacattacaagaaaagaaaacaacagaccaatatctctcatgaacaaagatacaaacattttcaacaaaatattagcaaaaagaatccaagaatgtatcaaaaaatatacaccacaaccaagtagaatttattccagatatgtaagggtggttcaacgtttgaaaatcaattaacgtaatttgtcccatcaacaggttaaagaagaaaatcacatggtcatattgatagacacagaaaaagcatttgacaaaatttaacacccattcatgatgcaatctctcagtaaactaggaatagaggaaaacttcctcagcttgaatgtaccttcctctcaattttgctatgaacctgaaactcctcttaaaaaataaagtttttcatttaaaaagaaaacaaaaaacatggaggagcgttgatgtatctcattttagaccaatcagctatggatagttaggcgacagcacagatagctgctgtacttctgtttctggcaatgttccagactacatttaaaaaatttttaattatagacttgtacttaatgttcaagaaaaatatgaaaatgactttgccgtgttaatgctactcttttttaaaaaaaactaaagttcaaactttatttatatttcattagttttttagctactgttctttttctgttctgggatctcattcagaatgccacattacatataattctcatgtctccttgggttcctcttagttttgacagttcctcagacttttcttatttttgatgaccttgacagttttgaggagtactggttagatatagggtaatggtttttaaagtatatttgtcatgatttatactggggtaagggtttggggaggaagcccatggggt

SEQ ID NO: 482325 - DNA, 1000 bp, Homo Sapiens
tcaactctgtgagttgaatgcacaaatcacaaagaagtttctgggaatacttctgtctatttttatgtgacgatactcccgtttccaaagaaggcttcaaagcactccaaatatccacctgcagattataaaggaagagtttttcaaaactgctcaatccaaaggaaggttcagctccgtgagttcaatgcccacatcacaaagaagtttctgagaatgcttctgtctagtttcaaggggaagatattcccgtttccaacgaaggcttcaaagcgttccaaatatccacctgcagagtctacaaaaagactgtttcaaaactgctcaataaagtaagttttaccttgttagttgaatgcacccatcaaaatgaagtttctgaggacacttctgtctacttttcatgtgaagatatttccttatccacaatagcccccaaagccctcaaaatgcccactggaagattcctcaaaaagacggtttcaaaactgcagtatcagaaggaaatttcaactatgtgagtagaatgtatacatcacaaagtagtttctgagaatgcttctgtctagtttttatatgaagatatttccttttctaccttaagcctcaaagtgctgcaattatgcactttcagattcttcaaaaagagggtttcaaaactgctctagcaaaaggaagtttcaacgctgtgagttgaatgcacacatcacaaagaagtttctgagaatgcttctgtctaatttttatgtgaagataatcctgtttcccaagaaggcttcaaagcaccctaatatccgcctccagattctacagaaagagtgtttcaaaactgctctatcaaaaggaaggttcaactctgtgagttgaatgcagacatcataaaggagtttctgagaatgcttctgtcttgttttaatgtgaagatacttccttttcaaccgatagcctaaaagagctccaaatgtccaactgcagattttttaaaaagaatgtttcaaaa

SEQ ID NO: 482326 - DNA, 1000 bp, Homo Sapiens
agctcgacacagagtctcgtagaacagtttgtgatgtgtgccttcaactcacagagtttaacctttctttcatagagcagtttggaaacactctatttctaaagtctgcaagtggataattggacctctttgaggccttcgttggaaacgggatttcttcatacaacactagacagaagaattctcagtaacttctttgtgttgtgtgtattcaactcacagagttgaacctttcttgagagagagcagagttgaaacactctgtttttggaatttgcaagtgcagatttcaaacgcttcgaagacagtgataggaaaggatatatcttcgtattaaaactagacaaaatcattctcagaaaacactttgtgatgtgtgtgttcaactcacagagtttaacctttctttaatcgagcagtttggaaatacactctttgtaagtctgcaggtggataattggccctctttgagcccttcgttggaaacgggatttcctcatataatgctagacagaagaattctcagtaacgtctttgtgttgtttgtattcaactcacagatttgaaccttcctttagagagagcagatttgaaacactctgtttttggaatttgcaagtgcagatttcaagcgcttctaggcctatggcagaaaagcaaatatcttcgtataaaaactacacagaatcattctcaagaactactttgtgatgtgtgcgttcaactcacagagtttaacctttcttttcatagagcagtttggaaacactctgtttgtaaagcctgcaagtgcttttttggacttcattgaggccttggttggaaacgggatttcttcatataatgctagacagaagaattctcagtcacttctttgtgttgtgtgtattcaagtcacagagttgaaccttcctttagacagagcagttttgaaaaattctttctgtggagtttgcaagtggagatttcaagcgatttgaggctaatctttgaaatggaa

SEQ ID NO: 482327 - DNA, 1000 bp, Homo Sapiens
ggttatatttctgctttaatatatagtaacatttgaaaatacacagatatccaggaaaaaaaggtaaagcagtatgaggtattgacagcacaactgtgttttaatttgggagttaatttggggtgttatgtaacagcaatcatacttgtagacaaacacatccactagctctgcaaacacattcaaaggtaatagtatatagtacactccaccctgtaaaatatgtcaaatacccccactctacaaattcactgtgtttcattattttttttttgtttttataagaaaaggggcatatcattataattcacaatccaagtcagagtcttaatttaggtatgaaatattacctgccaatttgcttctcaagctactttaaaaatatatatatattctttaaagccattttatggccatgggaatctaattaatttcataatgatgttggttgaacatgataccaaaaaatgcaggtattttcaagaacaataagatagataacagcattaaagcataatcctttaagaattcatgagaaaaaaaaggatgataaaacttaagcttctttttcagatgtttaaaaatttctataaaattctttgtcccaagattaatcatataaccatggtacataaaatatgctaactacattgcctggtgtcaaggtgggaaaatcctcttttataacataaaatcctcttctaatccatgttgacccaagtcctggctgtctgagggcagattcctgtcaagagacctaaggttgtcatggaaagcatcactttcgtctactagttggtaatcctgttccatttccgttaggaagccactcccagatcctgatccagagccggagccggagccgaagcctgatccagagtagtcctcagaaagtgggaagatacgattcaagtcctggattctcgtctttctgaagtatgaaagaaaaatgggaaaaaaaccagtggagtttgatatgtgggaaagataattataatag

SEQ ID NO: 482328 - DNA, 285 bp, Homo Sapiens
ataagccctgtaaaacaaatttcaagcgcgagaagaatttgacaagccatcgctgcttctaaaatatccaggaccacagacacacacacacacacacacacacacacacacacactcacacacacacacacacacgcagagagagaagtgagtgaggagatagatatgttaatttgtttgactatggtgattatttcactgtatatgtacagtatatcaaaacatcactgttgtgcactttaaatatatacgatttaaaaacatatacagagccacatgcaaaaa

SEQ ID NO: 482329 - DNA, 253 bp, Homo Sapiens
cacatattatccttatcctggtaccacgctacctgctaggctttattgccttgattgccttctgctacatgcattagcactaccatgcttgaaatacacacacacacacacacacacacacacacacccacacacacacacacacaaatatacatcatggaacttttggtttaaccacccagccatggttttcacggtcataaaccatttaagtcaaaagtaatcaccaggtgggagctcatgagttgtaaga

SEQ ID NO: 482330 - DNA, 376 bp, Homo Sapiens
atgttccccttcctgtgttcaagtgttctcattgttcaattcccacctatgagtgagaacaaactgagatataagagaacacagacaattcaacaaaatcagaaaaacaattcatgatctgaataagaaattcaacacagaaataaataaatatcatttttaataatgaaacaaatcttgaaaccaaagaatatatatatatatatacatacacacacacacacacacacacacacacacacatatattagagaacttcaacaatagattagatcaagcagaagaaagaatttctgaactttaaaactggttttttggaataaaccagtcagaccaaaaaataatagtaataataaatagaaaaaagattttaaaa

SEQ ID NO: 482331 - DNA, 1000 bp, Homo Sapiens
cctgaggttaggagttggagactagcttggccaacatggtgaaacccctgtttctactaaaaatacaaaaattagctgtgcatgatggtgggcacctataatctcagatacttagaaggctgaggcaggagaatagcttgaacctaggagatgcagaaggcagtgagccgagatcgtgccactgcactctctagcttgggtgaaaaaagctccatcttggaggaaaaaaaatggaagtcagggaagtagagaaacagtaaaatcttttgcatggcagctggctaaattaggattaaaggaggaggaaactccctggagcatcaaggaaaagggttcctagatattcgtgtaatgtcttctcttggtcctcagatcccacattcacaaatattgagaaacagacaccacaatcagaaattgcaagctaattattttattggtatacagaagttagagctatgatgacctatttcccaatgtcatggcatttgaatcatttgaatcactctcatcttcttattcacttcctgaaacaaacaaacaaggaagttcatagaccagacttgtcatggcaggaaatgtcgaattcctcactggtcttactgcactacagtacatgagagcccatcctctctcccccatcccttctacctcctgtgtttcctcccgagttcactgtgtgttcactctttggatgcccttgcacgaaatgtgctccagattggtccctacgtgttgggaacagaagatcattcttagcttgttattacttgctgctgaatttgttcacagatatatttacacagatgggaactggaacatattttataacagtgagaagctgaaaccaccctcagtgtccagtgacacagattggttaaagaaatcacggtgcagccacataatggagtagtataaaatggtaaaaacaaacagataaccactgaagagatctacttagcttcatagacgtatgtggaaattttcaaagaaatgtatt

SEQ ID NO: 482332 - DNA, 1000 bp, Homo Sapiens; identical to SEQ ID NO: 308952

SEQ ID NO: 482333 - DNA, 1000 bp, Homo Sapiens; identical to SEQ ID NO: 308953

SEQ ID NO: 482334 - DNA, 1000 bp, Homo Sapiens
gatcaacagaaaaaatagcccagaaatagacccacataaatagaatcaattgatctttgacgaagcaaagacaatacagtggagtcaagatagtcttttcaacaattggtgctggaacaattatacatccacatgcaaaagaaatgaatctggacactatctgcttacacccttcacaaaaattaaaatggattataaacctaaatgtaaaacacaaaattataaaactcatagaaaataacataggagaatatctaggtaagcttgggtatggtgatggctttttagatatgacactgaaggtatgatccatgaaagaaataattgataacttgagcttgattaaaattaaaaacttctgctctatggaagacaatgtaaagagaatgagaagccaagccatagatagaaaatattatcaaaagacatatctcataaaggacttttatccaaaatatacaaaaaactcttaaaattcaataataaaaaaagtaacagccaatttaaacctaggaaaatgacctgaatagacatctcacccagtaatatttacagatggcaagtaatcatataaaaagatgttcaatattatatgttactagagaatttcaagctaaaacattgagataccactgcccacctgttaggagggccaaaattgaaaacactgacatcaacaaattctggtgattacatggaacaaccagaattctcattcattgctggttggaatgcaaagtgtacagctactttggaagacagattgacagtttcttataaaacaaaacctataattcagcaatcatactgcttggtatttgcccaagggagatagaaacttacattcaaacaaaaaattgtacatggatgtttatagcagctttattcataatcgctgaaacatggaagcaatcaagaatgtccttcagtaggtgaatggacaaataaactgtgtggtacattcagaaaatggaatattattcggtgccaaaatgaaatg

SEQ ID NO: 482335 - DNA, 1000 bp, Homo Sapiens; identical to SEQ ID NO: 308954

SEQ ID NO: 482336 - DNA, 389 bp, Homo Sapiens
gtttctagttattctattatttccagtagttttatttacatatattgattataattttaatacttagtaatcttttattttccagagaaaactaggaagtagacagttataaactgtcatatattagcattctatagtaggttagaaaatgtatgaatataccatctcccaacatctagagggatgtgtttcctcataatacaattcctcagtgtggcagaaaaaaacatgtttattaacgggccaaaatatctttagtctctctgtaaaaacaggaagccaaaagtatataaacttgaattatttatgttcagtaattaatgttttagtattgtatcttatttataaatggtctagatatttaatgcaaatcttttacttagcttaac

SEQ ID NO: 482337 - DNA, 1000 bp, Homo Sapiens
tgtgttgagacttccatcaggatgaacaggagaaagcagcattgggtggagagaaagagggctgtcacttcagatgtccaagcgaatgctgctttccctaaatcagaagataggtcagtgatgagcagaactccacagacactcctgaaatgcaaccaggcccaacacacaattttttattggtttagcctatttcgtacttgggggttgggagctcaatcttcagggaaacagaaaaaagagagaagtattcatgtaagtaggagatgagaagcagagtgagaatcacttttaggaacacagattgggagcaggtacaggagaatcctgggtgaggatgaagaatgacctgggatggttttggagctagcctctggaatcctttctcttgacctgtggaagagagaacattttcagggtttcaggggctatggcacagcaggagtagggcaggggaggcgggctctgaggcctaatttgagtagggctcgctggttgtctccatcctcccatgatgcattctgtgatattccctgcattttctccccagtctggcttcattatggtttcattgaggtgataggatatattaggctgtgctctggctctgagattcctttatgcccatgtgtgatgttccatcccctgcccccatcatctgccctatcccaccctcctccttaccatggccatcagcacgagggcactgaccagcacggcatacaaggtggccttccctagcaagatctcatagaggatggtggcagacaggaccccttgctggtaagactctgttgacaagaacagagcatgtaggtacctgtgcacaggtggctctggcctccctcacgcccctgtgtccgtggattctccatgccctggttcgagagcagagacggcgaaagatagagagaaaaaggagagactcacttaccggaggtgaagccacagtctgaaagaaaacaggggaagaaaaatggatgagagaatgctgctttgt

SEQ ID NO: 482338 - DNA, 988 bp, Homo Sapiens
ccctcaccagctggccacatcctgtgggctgccatgtcccttccatgcaaaccacagacctggaagctcccacttgaagctggccgcccaggccccactcacctggtcttgagacccggtcttgggacgcagggctaccgtgcagctgagggtgccggttttgggtatgggtactgtgtagaagtggaggaggaagctgaagcgcgggtcaccctcggggcttggggacagcaggctcacacagttgcccttggccgcccggccctggatgagttccacggtgcctccctcaggccccaagtccaggtggcagctgtctaactggagcaggaactcggagacggatggggacactctgacctgcatgggtaggtagggccacgcggcatgggcagctgctcttcaccccaccccacctgctgccttcaaatatcggctagaattaagagttcccacccctgagtcctcacagtggaaagaaagacatggacctgtactggggcagaggaggaggacagggccacatccttgtcagtgtccctgagcaatgccttctctgtctctccctctccctgtgcacccaggctgtctccctcctgactctgggagtctcatctcctctggagtcatggtgggaagaaaggcggagaggaagttccaggagctgggaggccgaggggtgacaggcatgccaggtacctgcacaaagctctgctgccccggctcgatggtgttggaggcctggaggaagtgtgggctgaggtagaggcccagctggaaagagaggctgtccatgttgaggcagtgcacctttttctgggggaggacgggagggagacttggtcaatctggcggcgccagccaggagggcgaggggtgtggggaggaacaggcatcatggccctgtggagttgcctgactctctttttttttttttttgagacggagtctcgctctgtcgcccaggctggagtgcagtggtgcgatc

SEQ ID NO: 482339 - DNA, 1000 bp, Homo Sapiens; identical to SEQ ID NO: 308957

SEQ ID NO: 482340 - DNA, 1000 bp, Homo Sapiens
ccacctgctcctctcccatttggtcagcggaagggtcaggtgcagagctgggtggtccacatcttacgagctggctacaggttggggccccgggcggcagcccctctactgcaaccctaagcccaaagccacccactccttgcctttgaggcccctcctcctgcccccttcactggagaaacagctcagccttctctctgcagcctctggagcaatcatccacccccgccgctcacaggggtgaggcagctcaggcaggggtgaggcgggggcttgtggcccaaagaatacattcacgtggcaaggcagagagctggggctttcaggttcaaacccagggtgtcccccaaaatggcagcagtgggagacgcccctcaccagaaccagagtcctgctgccccaccctgccagccagagaggttggcacggcttggcccctcccgtctactcggccagcacaagatggcagccagagagctggggccactcgtccaatttgtgcaactgtcccccaaagcagcgaagccaaggggctactttggccccaccccggacacctcagccagcctcagtgacaggagctgctcacaacaggtctggcgggtggggctcagacaggcctcctgtgcaaactgctggcccccagcttccagttaccccatggcccgccttctggggggtaagtatggccttgggggccaggcaggacaggtccacggggcctgtgtccccactgccccaaaataacagtgtgttttttctttcagcctcctaaccattttttttttcatttttcatctttttttcttaaaaaaaaaaaaaaaaccaaaaaacaaaaacctctgtggaccttccattgtcacacccactatcctcacagcaggaaggggtgtttagagtctagtttttaacaatatttttgcctctcctaatgttttcttcagtcgtttaaaattaaaaaaaaaaataaaaagaaaaaccccctcccccagtctgtaaa

SEQ ID NO: 482341 - DNA, 1000 bp, Homo Sapiens; identical to SEQ ID NO: 308958

SEQ ID NO: 482342 - DNA, 1000 bp, Homo Sapiens
  misc_feature (215)..(215): n is a, c, g, or t
  misc_feature (309)..(309): n is a, c, g, or t
  misc_feature (440)..(440): n is a, c, g, or t
  misc_feature (509)..(509): n is a, c, g, or t
  misc_feature (585)..(585): n is a, c, g, or t
actataatgctaatggcactaaaacctccctgaataaagaaattatgtgaaagctccaaacccgtaggttggaatatggccaggagtcattgcacccggttaattatttgttgacacgggttgtgccatttgccaaagctgttgtcaactcctggcataagcaaatctgcttgcctcagcctcccaaagtgctgggattataggcgtgagcaccngtaagcggtcttgacagtatttaattataaacaaggctagtacttttttttttcccccataaaatcaagctactgcaggaagggctaaatactntttctcttgcttattgaacatctgcattttgtttattgtgaattgcttgtcttaggcattttcctaagggagtataagttttttcttgttttgttttgtttttttttttagacagagtctcactctatccncaggctggagtgcagtggagcgatctcggctcactgcaacctgcaactccttggttcaagcgattctcntgcctcagcttccctggcagggtaaaactcttactggaacgtgaatcacttatgatagaagtattttatctcagtntgtcatttaaggattcttttttaagctttgccataaaaaagctttttatttttatgtactgaaatttttcagatttttccttggaacttctgggtcttctgttatgtttaaagccttttcccacctcaatgaattatcaccatattagtaatactattaaaacaaactcctaggcttgcattttctgccttggatttaaatttgctaactcagcattatgctgctctgggttgagtttcgtttagtatttaacatcccttaaaacacagctttatgttcttcaatattccatatattgtcatagaattttatttggatctccaaaatgagttgctttattttctaaccggttgaaatctcaaattagtttgatatcaaatgaaggtacagttgtagcaccattttgtaggtagag

SEQ ID NO: 482343 - DNA, 1000 bp, Homo Sapiens
cccaaatcaagttggagctgtccatgagacccagggaaacccaggtgaaagagaaatgtgcgtccaccaaccagtgaattttcaattagttaatttcataagctacagcagaggcgtggaccctgccctctccacacttgaagagataagcccctgggatccaagtcccagcaaggttggtgccacccatcttggtgaaagatgctgttgttcctgtggaaaccatcaccagaggtaggaagggctttgagcccaaaaggaaacaagagggcgtgaatccaggccatcctcaggggagggtgggagcccatcccaggcagagaggcctaagcctcagtgtgggccaaggctcaaaggtgctggcacaggcttcccagggagaacagaaactcagcagtgaaagccgcagaggggaagaagcaggctgatgtcaacagcgtggggctctgtccctcaccccaaggagagggagtgtgccagatcccaggccaccaagcggggccagctccagcctgggcgatcgtcccagcagctgagagggaagctttaagcagaccagtgggtaggagaggagggagcatgcggcaggtggggcagccacacaaaggagagttcccagaaggccaaggtgtggtcaccctccacgcctcccgacttcctcctggagtggctgggcagcatgcagggcagcgtccagtaggcggcagtggcaggaagggagcgggcggcccttgcaggtccctcagttggcagggctgcattgcagaatctgctgtggggcaaagagcttcctggcagccacggcttcccctggctttcctggcactgggcagttctctttgttgtccggcccggcaggctggcctgaggccttcttgaagtagcagagccgacacacggagtggtacttgtctgctcccccaatcacctcgacctggccgcagggacaggggatgggtgaagggccaggacaggaaggaggcagagccatacccccacc

SEQ ID NO: 482344 - DNA, 92 bp, Homo Sapiens
ccttcgagccggaattgaaccacgacctaaggatgtccacaaacgtttccgcagtctacagtcctccgctctaccagctgagctatcgaagg

SEQ ID NO: 482345 - DNA, 1000 bp, Homo Sapiens; identical to SEQ ID NO: 120015

SEQ ID NO: 482346 - DNA, 1000 bp, Homo Sapiens
gatcaatgggtcttattttgaagaaacacatggccttctgactcactgcccctctactctaccatcagcccgtctattgagctctatatttccatcattctcatttccattctccaaatttctaattagatcttgtttataatggcttagtcagtagcctttcatgtttttgtgtttatttattatgcttgtcataaattattctgaatatcaacgataaacaaagctggacactgattaaagtggtgaggccagattttaatcagcaataactattgcagtagggaaaagagttccgcaagaactgaatgattctttgatttgtgcagaggggaacaggtgttttaagagacagagagggcatagggatgggaaagcagaagcttagcagagttagggaagtgaaaaatgcagactgtgtaaatgcaactaggtcacctgtggctgaggctggcagttactgaggtaggatcctgtccttcctcagagagcgggagacagagactctatattgtcttcaggtgttggctgaaaaaaacagtaaatctttttggcagccttgagttttctcaggtgggcactttaagtgggcccagggtcatcctagggatatggccttgagctgttagaaaccctgtgaacaggctgggcgcagtggctcacacttataatcacagcactttgggaggccaaggctggaggatcacctgaggtcaggagttcgagaccagcctggccaatgtggcaaaaccccatctctactaaaaatacaaaaattagccatgcatggtggtgggtgcctgtaatcccagctactggggaggctaaggcaggagaatcgcttgaactcgggagacagaggttgcagtgagccgagatcatgccattgcactccagcctgggggacagagcaagactccatccccagaaaaaaaaaaagaaagaaaagaaaagaaaaaagaaaccctgtgagcgtttggttgaggcctggacgagaaga

SEQ ID NO: 482347 - DNA, 1000 bp, Homo Sapiens; identical to SEQ ID NO: 308962

SEQ ID NO: 482348 - DNA, 1000 bp, Homo Sapiens
gatccgcccgcctcagcctcccaaagtgctgggattacaggcgtgagccaccgtgcccggcctgtctctttcttttctctgtctctctctctccctcttccccctgctcctagtctctctctctgtctccctccctctcaatctctctctgcctatctccctctctgtctctgcctccctctctgcctctgtcttcctctctgcctctgtctctctctctgcctctgtctctgtctccctctatgctccatctctctgtctccctctcagtctctgtctctgtctccctctttgtctctgtctccctctctgtctctgtctctctgtctctgtctccatctccgcctctgtctctctgtctccctctctgtctctgtctgtgtctccctctctgcttgtctctgcccctgtctctctgtctccctctctgtctctgtctctctgtctccctctctgtctctgtctctttgtctctgcctctgtctctctgtctccctctccacctgtctctttgtctccctctctgcctctgtgtctgtttccctctctgtctctgtcgccctctctgtcttcgtctgtttccctctctgcctctgtctctgtcgccctctctgtcttcgtctgtttccctctctgcctctgtctctatgtctctatgtctctgcgtctctgtctccctgtctctgtctctctccatgtctctgtctctgtctccgtctccatctctgtctcatgaattctcctgctcctcccctcctgaacaattgctgctgcatctgttcagcccggagccctcggggccactgtgctggttctgtgagcaccgcccgcccggctccctgcccaccctgcctacagccgcctcatgctccagcgtccgtatgtggggcagcttggacccaaatctccctgttaaagcagcagaacttcatttggaggaagtctgaccccggtgccaagtgtgggccgggccgcgtggtcccccagtgctgagtgtggg

SEQ ID NO: 482349 - DNA, 1000 bp, Homo Sapiens
tcattttagccacaaaactttatttacaaagttttttagaatatacttgctatccacccactattccaagagtaaaatgatgtcaagtagattacacaagagcataaaacagagaaaacaagtctacaatatatacagtgccataagtggttgctatttttacagttttcttttaaagataatctcactgaattttttttgctgataacacttcagagtgatgttgtcttcaaatgtagatttccacagggattcaagagtataacagtccaatatattttatacctcctatctgacattacgaataactgcaaatcatttttttcccctttttttttcaaaagtcttggaggatgaagaattatgactttcaccaccactatagtgttcatataaagttttagcagctttcaaaatggagttaggagaattcagaccaacaagttggcccagaacatatttcatttcttcagtggttcccttggccatttggttaactggatgagtttgaatttgaacatatggatgagccaggagctcaggaatggatatcctctgttttgggtccctttttaaacaacactttaacacatcttgaagatctttctctggaatatcgggaaattcaatttcatgattaggatcaattatggcatgtaatttagaaatctgattaattatctgctgaaatggtgttttcccgtaagtcatatagtacaaaatacatcctaaggaccaaacatcacttttggggcttatctttgacttagatttcccattctctctggaggaagacatatctttgattgcttctggtggcatataattaactgtgccaacctgagaatctttaacaacacttgttgtatctggttgcatttggtttgcaatcccaaaatcaattagctttagcattccatcaactatcagaaagttagctggtttaagatcactgtgaacaatgccatgttgatggattgtgtgaactgcctctaacata

SEQ ID NO: 482350 - DNA, 1000 bp, Homo Sapiens; identical to SEQ ID NO: 308963

SEQ ID NO: 482351 - DNA, 1000 bp, Homo Sapiens
ctcgaggatcccacaaggccctgttctgatgtttgtgtggagctggaagagagaggagtaggctcttctaggattgctgaggggctggaaaaggggcaggagctgctcttaattattttgccactgctgagagcagagcaacgtgacagaaaacagaggggtccccagcctctgagggcactgcctgggctcctaggtgcaattgtgcttgaagcccttggacttcttagttatttgaacctatttatgtttttttttttttttttttttccttttctaagagacagagtcttacactgccacccaggctggagtgcagttcactgcagcctcgacctcctgggctcaagcgatcttcccactgcagcctcctgggtagctgagacacaggtgcacaccaccatgcctggctatttattttttatagagattggatctcactatgttgcctaggctggtctcaaacttttgggctcaagtgatcctcctgcctcagcctctcaaagcgctagcatcacaggcgtgagccaccacacctggccctatttgtttcttacactgggactcttgcagccataacagacctgaatgcttcaaccgtgactgtggtcattcaaaatcaaaggtcaactcacatccagcctgggccccagacagagacagaagtcagtaccactccctcagtttgctagggaagaagtacagacaacttctactttatctgaaactagaagtcaccctcttaggattagcaggtgtgattactgttgaacgagctattttcctaccatgtgtcagtccgcttccttcttgtcactgtcactggcaggagaggcattccgatggcattccaagggacagatgtcatggaagcaaggccctctaaatgcttgagctctttggaagagagggctttggtcatccaggtaacattccaggaaaacgtgatccttgatagaaacagttctgagtggctgcaaaggtctaccttaaataaaga

SEQ ID NO: 482352 - DNA, 1000 bp, Homo Sapiens; identical to SEQ ID NO: 308964

SEQ ID NO: 482353 - DNA, 1000 bp, Homo Sapiens; identical to SEQ ID NO: 120016

SEQ ID NO: 482354 - DNA, 1000 bp, Homo Sapiens; identical to SEQ ID NO: 308966

SEQ ID NO: 482355 - DNA, 1000 bp, Homo Sapiens
ctgcagatctgtttcttgaccaccaaggggcagaaatgcatttccacccccttatttctcacacagtaaaagagaatttaaaaattacctaatcaaactcagtggtagaggtggtgatccgctaaagaatctcatgcacccacagttcccttttaagacctattaatgcaagtactagtatagaatatatatatatttaaagctccagtttcagatagcaaggtttttccctttagaaaatctgtctctctctgtctgtctccctttctcccttcttccctcccttctctgtccctcccttctctctctctctctctccccctctctctttctcagtctctttcccctttcccctttctctgtattcgagttggaaaagtgttttttcttgcctttcgcagtcaataaacgtttacattacccagaaagcgctttacgctactggctttttgtgaaaacacaagaatgttttaatttgggggttaaaagtctttttttctttttcgcaaacttgaacctaccaatccagccttctttcgcgcctgctggagctcctggatcaagttctgcagctcctttccttccaggtaaccacttcctgcaaagacaaagaggcacccaggtgtcagatatctcattccaagtgtctttcccgttcactttccaagacagttatctttctggcgacccgagaggctctctcttgcctggacgttgattaaccagcaaagtgtacagacggtgaagcgctcccctcctgggtatcaaactttagatccactgaggacaaaggaggatggttggggtgctaagcgtagcaccagaaactttgggggggcagcattccccaatccctgctctctctctcctaccattaccgttcctggaaagacaaaagtttaaggttttgggattacggtggaaacaatataaactttcaggttgacagtttggcggccagtcggggagataagaagataagattaggcagaagggggaa

SEQ ID NO: 482356 - DNA, 1000 bp, Homo Sapiens
catttcagcttaattttatttcctcttataaatgggcacagcacaggaagtgttaaaaaacaaacaaacaaacaaaaaaaaaaaaaacaaaaacaaaaacaaaaccagttccttcacaaggctggaacaggagagtacccgcagtggggcaggcgccttggtctcttttttccactgtctttttcttttgtttttcttatttaaggttttggccatgaactcaggacaggtatggttaataaacaggttacaggggagagaaggggcagggaaggcctgggggagggaatggcagacccccacccaccccaggcaggttctgtacaggagaaaggactcacaggagggagggacactgtcttcagggggctctctggagccacgctgcctacgaaaaatatttacatgcatttgccacgctgaggccagggtcactgtggtgccaggcaggcacctgggggatgctggggccatcggctctcagatggcaactcccagggcccagtctcgatgcctctgtaaatctgtacagtttgcgggcttctatttacaggcaagaggcctggggaggcaagtccagggttgtagttgttgggagaagaaatccagagaacacaggaggcagccactcctaccccatgaggcagagggtctgctccctgtgtccaggggcccccaccaggaggcctgacaggcggctttgccaaccccaggggggtttggcccacacaccctaagccctgcccagccctggttgccacccacatgcctccagcgatcaaggggaccagtctttcaggcaaggcccccatctggcctcctggcctcctggagacagggtctgggctctccaggtcctggcctgcctcgtgctctggcagccaaggccccagaggctctcaagccacagaagctccctctcatttggaactccctgtgcttccagcaaatgccaaagcccctcagaacactccatcacaggcaggggtagggggacatg

SEQ ID NO: 482357 - DNA, 1000 bp, Homo Sapiens; identical to SEQ ID NO: 308969

SEQ ID NO: 482358 - DNA, 1000 bp, Homo Sapiens; identical to SEQ ID NO: 120017

SEQ ID NO: 482359 - DNA, 1000 bp, Homo Sapiens
gcaacataaacacttaagcatttagtgataaaatattaaaagctagaggctccagatccaatgagtacaagttgctgatatagcatcatataccaaggaaaggtgtcaagcatgctaaaatatgtctgtagcttagacattaggggccctactcttcccctaatatgcttgccttgttcctactgtccacagttaaatgcacacatcagcactaaaatgcatccccttaaaatctagggaggaaattcaacacatctatgtcaatgaacaaagtaattgtcacatttattcactacaaacaacagatctagacactgtttttaattataacattaattgatcttttgtaatcactaattagaatgataacatcacatttagttactttcctagccagagtgaacttccagttgctggaaaatgcatcagtgaagaagagggtgaggtgtacaaaaaagaaagatttagcaaaaaaaaaaaaaaaagtcatactattttttttaaaagaaatgttttaccacagtcaagcacattttatattttaattaatcttgcttcgtgtgaagatttcatttagtctctttgcaattagagttcatattggtattatataaaatgttgccccactgttgtgaaattaggaacaaggaagactaggttgatgaccagaaaagctaccttttgtgccttgaggaaaaaagaaacgtcttatgaatctgtcatagccctagtctgtgagaaatgtaaaggactttaatgggtattttagtagaaccacttaaaattaagtgatgaattggaatgggaaaagttattccaataaaagcaaacaaattaactaacctgaccttggtccacataaaagattcattttcttaatggaaacaaactatttgagtctagctcaggtttaaccactgaagtgtatgtggaacctaaattaagctacagaaacgtacgcccccccacacactcaggtgcacacacacagggaggtaag

SEQ ID NO: 482360 - DNA, 1000 bp, Homo Sapiens; identical to SEQ ID NO: 308971

SEQ ID NO: 482361 - DNA, 1000 bp, Homo Sapiens
ggagacagagtcttgctcagtcacccaggctagagtgcagtggtgtgatctcggctcactgcaacctctgcctcccaggttcaagcaattctcctgctcagcctcccatgtagctgggactataggcgtgtaccaccacacccagctaatttttttgtatttttagtagagacagggtttcaccatgttacccagggtggtcttgaaatcctgagctcaggcaatccgcctgcctcagcctctcgaagtgctgggattacaggtgtgagcaccacgcccggccccagcgtggcatttcttagacacatctgcaatgctttgtgactaacgacacattcttcccaacggggctgtagctggggtacaggaaggaggaaggcagggacaaaggagtgaaggcatagcttgcacctgccctggcctctcatcccaaagaacagacccacaaagcaatcctgagtttaggaagccttgtgaaccaaagagcaaaactgtcagaggcagaactagaaccgagcagaggggagcacttcaagctcattctgtgcaaggagctgaggcagggctggacaggcagctgcgctggggcttgcgctgggtgcccttaccctcagcacagcactggaggctcaccagggcccccatggacacagctcagctccccagcacggccccaggctgacactggacctaagtaaggctgcacaagctgcatgcggctactgagcattttaaatgtggctggtgtgaattgagaggtgctagaagtgtaaaatacacaccagatattgaagactaagtgtgaaaaagagaatgtaaaacatctcacatttttcaaaaattgcatgttgaaataacagtttggatatattgggcgagatacattattaaaattaatttcaactgtttctttttacttttttagcatggctattaggaaatttaaaattagatgcagaactggcattatatttctgctgggtagcacttgaatgctagg

SEQ ID NO: 482362 - DNA, 1000 bp, Homo Sapiens; identical to SEQ ID NO: 120019

SEQ ID NO: 482363 - DNA, 1000 bp, Homo Sapiens; identical to SEQ ID NO: 308972

SEQ ID NO: 482364 - DNA, 1000 bp, Homo Sapiens
gaggtggagttttcattcttgttgcccaggctgcagtgcagtggggcgatctcagctcactgcaatctccgtctcccaggttcaagcgattctcctgcctcagcctcccaagtacctgggatcacacgtgccaccacatctggctattttttttttgtattttttgtagagacatgttggccatgtctctattaaacatgtctccatgttggccaggctggcctcaaactcccgaccccaggcgatcctcccatctcggcatcccaaagcgctgagattacagccgtgagccaccgcgcctgctctatttatctttatacctcctttttggcacagagctagctctagaagagatgccccataaatgtggaactgaatgaatgaagaaatgcattagaaatcagcatcacccacacccaggcacgtgcacagcaaacgcagggagatgtgtcatttggagctggggtaccccaggctgtggaaccatgaggcatagagaaggggacctctaacagaggggcggccttgctcaagacctcatggctcactggctgcagtggctcacgccagtaatcccagcaccccgggaggccgaggtaggaggatcacccgagctcaagaattcaagaccagcctgaacaacatggtgtgacctcttccctaaaaaaattaaaaattaaccaggcatggtggcacgcacctgtggtcccagccactcaggaggctgaggtgggaggatctcttggaaaaaaaaaaaaaaagacctcatgcctcatggctcgttaatgacaggtcaggcctagatattggcctccttatttccagctcaaggcttctccgtgtcctgctctgtgggcgccactcttttccctgcccaatccccccccccaacggtgccctcacagaggctgggatctcgacctccctcccacaggctccctccgagacagcaaaagggacaggtaggcagggatgggcgctgcccggcatgacgaggctt

SEQ ID NO: 482365 - DNA, 1000 bp, Homo Sapiens; identical to SEQ ID NO: 308973

SEQ ID NO: 482366 - DNA, 1000 bp, Homo Sapiens
gacatggaggctcgcccagtcacccaggctggagtgcagtagtgcgatcccagctcaccacaacctcccacctcctgggttcaagcggctctcccgccccagcctcccgagtagctgggactacgggcatgtgccatcatgcccggctaatttttgtatccccagcagagacagggtttcactatatcggccaggctggtctcgaactcccgacctcgtgttccgcctgcttaggcctccgaaagtgctgggattacaggcgtcagccactgcacccggctgcatgccacagtttttcacagacattatctcacgagtagacatgccaaacctagccatctagagctgtgctatccaaaaggtagtcactaaccacatgtagctatttaaatttaaaacatcattaaaattaaatttgaaattcaattcctcagtcacattcaacgcatttcaagtgtttgatacatgaaaacggctactgattgccatattgcacaacaaagagagaacatttccattatcagagaaattctacggcacaacaatgatctaagtctccttcacgaagattttccacaaaaacgtctgaagaattacattgggtccctcgtacaatgaagattaattcgctcacactaaagctgtaactacaatccatatacgtgtgttctcttgtacctgcagccaggttttcaccactgccagtttctacgctatacttggcctactgagagctccagtcttttacaaacacttactacatcctaacctctcttgaatgtctggcaaaggtttggatcaaaaaagacatcacatttttgcacatatgacataatacttgtagttgcctggaaatttattggcccatatgaagtgggatccccggggcagtgacaaaactaagtttatgctactgaggttttgcttgcccaggaaatataaaaaacttgtgactgtgaagtcactaaataaactaatggttttaataatgagggcaaaa

SEQ ID NO: 482367 - DNA, 1000 bp, Homo Sapiens
aacaaaataaattgtcttagtcattttagaaatgatagagaaagtcagacacaggacgaaagatgaactggccaggagccccagcctgaaggagcggggaccacatcatatagggacagcctccctcacacctcagggggtgtgttggaaagactatgcctcaatgatagaattaaaatatcatctttcatctcatgcaatttctagcaagaccaaaactccctctgaataagtctcctccaacccacgaggcctctgcagaccccacctgctcagggctgggccggcctcaaaagtcccacgggagccaccacctggtgtgaccactgctgttcactgcacaccaccagccgtgcctgttcctcctgtgccctgtcctgcacctgctccccgaggccccgctcgcacaccccagaaggaacagacgggctccactttctgtgcaaacttgcaaggtacccataagttcctgtatcagagacatcatcgcccatggggagctggcccctgagagccagtgcctggaggagatcgtccggggagaggacacagcatttagatacaaaggtaggaccttgggaacaaaacctggactccagagatcagggaggtgcctggaggaaggggcagctggggcctctgggcagggacagacagaggtctggctggcagcttgtgccatccgcttagccaggcggtgaagacgctgcctccaaggaattctcggttaccacagatggtcaccctgacgtgggcgtttttccacaaggcagattttgaaataattttagcaaaacaacctctaccactgcaaaataaaattaaacccaggaaaggccagcagtatgcatttgggggtggtggtggggtcggaagcagggccgagactgagctgtctccccactggccctcataggaatcctaatgacagtgtcagcaagacctggggaatggctggcatctgacaggggctgcaggctcttacagaagatgagaaatg

SEQ ID NO: 482368 - DNA, 1000 bp, Homo Sapiens
gagatggagtttcactctttgttgcccaggttagagtgcaatggcacaatctcagctcactgcaacctccgcctccctggttcaagcgattctcctgcctcagcctcttgagtgtgggactacaggtgcacaccaccatatccggctaatttttgtatttttagtttttgtatttttagtcgagacagggtttctccatgttggtcaggctgtctcgaacttctgacctcaagtgatttacatgcctcagcctcccaaggtgctgggattacaggcgtgagccaccgcgcctggcctgttccttggtttcttagcacttctcctttcttttcttttcctactggcccattctaatttccttctcttcttccctctccttgtttttaaactaacccattcctgctcccctatatctcttaacttcagtacaacttttcttgatagatatgtattgagcaagtagctaatgaaagaagccatgtggcttactagttgagagcctggattcagaaggcccaggtggacccccagctctgctgcttgctacctgggtagccttaggcaagttactcagcctagatctcagttaccttatctgtaaaatggggctaataacagtacctccctccaagggcttttgtgaggatcaaccaagatgaatacatgtatagtgcttagaatagaactggcatgtagtgagcactcaagaatatcaattattactaccccaagcactgagctgtatccttcaggggacacatgtgaccaacacaaggtcactgctctcaggtagtgactctgttgaataagaataaacaacaatcataaaaacaattataacataaagtgagctaaaatacctgaagagaaatacagagagggtgtctgagttcaaaggggtgcactataggtgagaggaatcagggaagatttcgtagcaaaggttttcatttgaaatgggctttgaagaactgagaccatacaggcaggaaagggaggg

SEQ ID NO: 482369 - DNA, 1000 bp, Homo Sapiens; identical to SEQ ID NO: 308974

SEQ ID NO: 482370 - DNA, 1000 bp, Homo Sapiens
ctttcaggatcttttattaacgtatagaaaatgtgtttaaaaaaggaactatacagaggctaaaagcaaccaggactaaaaatactagttaacaatggttaacaagcagagattccagtctttgagctacagtgccatgaaaggatcagagaagttggtttttcctctcccttcctctgtacatttttatttttattttagctaattaaagtgtgcatcgtctgaggagtatgtactccattttcttttttttttcttccttccagtctttcttttaagtaagcgctttttcaagctcattgtagctacaaagtcaataaattggtctttgttatttttacctgaaaaggctgttaaaggttaaaatgacaaactcaaattcaaagggattggaggatttggtgtttatgatttctcagaacaacaatctagagaccaccagggtgggtttcagctgctcggagccccagttaatgaccccctcagtgtcacagtgatttgcttagggtacttgggcatccccatgggcctggggagtattcgaggttggaatcattagatgtgtgtgtttgtgcatgtgcacctgtgtatgtgtgcatgcatgtgtgtgtgtgcatgtgtgtgtgtgtgtgtgtgtgtgtgtgtgtgaatgattggaaggaggagcctgtgtgttaaccaaaatagactcacatagattctaaaccttgagtctgtgggaccatggtgtgagtctgggcctccgcagttggtaaaggagcacttagttggccgacatttttgcaggaattgaagtgtctattgcatctaatgcacaggtgtcactgctgcccaagcagcccccacactggaatggaaccagtgttctggggttctttcttggggagatctattcctttatatataaacatcattcaattaaagggaaggggtttatgtctggagttttggcctggcagctaaaaataccaggttgccaagtactgatttccttctaaat

SEQ ID NO: 482371 - DNA, 1000 bp, Homo Sapiens
aaatgctttcccagtaactccaggaggatgagttactttgggagatcatttatagaggttctatattgacttgattccctcaagtgccttatgtttttaattgaaagaaatcttaagatttaatattctcttgctagacctgggaaaaaacaaaattgactttttaccctttttgccattcacttcctagtttaacaccgtaaacctttcttctaacacctttcagtacgcaacaaaacttagcagaataaaatggggctttggagttaaatttaaattcagccactactaagacctcaatttacgtaattcctcctgtatattatcgaaggggattaagaacttttcagagaatttaaaggactaaacgtgattgccatttaccaagcattcaatacctgcttagcacgagactgagacaaggtctctccctgcctgtgcactgcccccttagacactgtcacatatccaagtcccaggcatttcctatcatttttatatatggcgttaggctcagaatgcaaatcctatatgctatctaaccaagttttgtctctagaaccaccaaatttcagaagtgaagacttttatttagccattaccacccccagtcccagagggactcttacctattgggctgattttttcatcttttttttgagatggagtttcgctcttgctgctcaggctgcagtgcaatggtgcaatcccagcccaccgcaacctccgcctcccaggttcaagcgattctcctgcctcagccaggatggctttaagtagatttgtaaagaactttgagacactgtaaggccaaggaattaagtgactgtatttagcacagaaggtattccatgaataacatcaaaacaacgtggacactaagagaacacatgtaactcatggacgcaggggatgcatgttgtctgcattcctgttttctgtgcctacatgtgctccaccccacacctgctgagtacatgctgggaagaccatgtcaacc

SEQ ID NO: 482372 - DNA, 1000 bp, Homo Sapiens
cacgggtaacaatttttatttgagaacacaagtttcacaagaaaatcatcttttttttttaaattgtgacttttatcttaacactgtgtgaagtactcaaggtccaagaagcttaatggtcatttgtcaaaatagtaattatccaattttttcctatgaattatgaaattttttcaaaaccagaaataaaccaatgaaaataaataaaaattccctagaatttcctcaatggaatgcatgcccctattacctttgagtctgatgtatatgaatttaaaccattttgtaaaattgcaaatccaatcatacttaatacttcaggtttccaagcaaagcttgaagcctacaacatattacaggaattatctttactgacaactgatggaaacatctctaaaataagcttttgaagttagtacattaagcctaatttaatataaaggcaatttaatcttatcttcatatgaaagaaaaatacactgtcaggatgaaggatttactaaagttacaattaactggagatatatcaccagtaaaaacctaattccctgttataattaaatcaaagcctcattaggttagagggtgtggaagggcatgacccagtgggaggtgggaatctcaccaataaaacgccctcatgtgccccttccgcacaagacctgagcgcccagtggaagcagctggaggacagaggagcttccagcagaagaggtgagcccatgcctgtgtgtgtgtttttcctccttagatgcctagaaatgggggttatgccttgggggatgaatgagagaaattcgtaattaatgaattcaacaaaggctgtctgagtgctgcctcagagttgaaaaccagtcaccctggatccccagatctccagtctaggagtggtggcagtcaatttggtattcatttccaaggctggagaaggatgtgatttttttttttttttttttggtgagacagggtcttaactctgttgtccaggttggagtgacct

SEQ ID NO: 482373 - DNA, 1000 bp, Homo Sapiens
gcgcgcctgcaggtcgacactagtggatccaaagaattcaaaaagcttaaaatttatgtgaaattacaacagactttgaatagctaaagcaatcttgaggaagaagaaagctaaggatattatagtttctgatcttttttttttttttttttgagatggagtctcactctgtcacccaggttggagtgcaatggtacgatctcagctcactgcaacctctgcctcccaggttcaagtgattctcctacatcagtctcctgagtagctgggattacaggtgctcgccaccatgcccggctaatttttatatttttagtagagacgagatttcaccatgttggtcaggctggtctcgaactcctgacctcatgatccacccacctcggcctcccaaagtactgggattacaggtgtgtgagccaccgcacccgcccctatagtttctgattttaaattatattcaatactatagtaataaaaacaagacagcatgtgcataaaaatggacacggaaacctacagaacaaagtagagatcctagaaaaaaaaaacctatgcctataaaatcaattaatcttgaacaaggatattgaaaatgcacaatgcagtaagtgaaatccctttattatttggagctaagaaaattgggtatccacaagcaaaagaataaaattagatgatttttcttacatcatatcccaaaattaactcaaaataaggacaaataaaacacatgaattcttaaaaatcctaaaagaaaacaaaatgtggtcaacctcctttatattggtcttgacagtatttttttggatctgacacaaaaagtgcgccacaaaggcaaatataaaaaagttggactacatcaaactaaaaaacttataaacagaaaacaataagaaaacttacaggttgggagaaaatatttgcaaaccactgttaagtggttaatatccaaaatatgtaaggaactcatacaaataaaaaaccaaaacaacaataa

SEQ ID NO: 482374 - DNA, 1000 bp, Homo Sapiens; identical to SEQ ID NO: 308977

SEQ ID NO: 482375 - DNA, 1000 bp, Homo Sapiens
cccggggtaaggacagtcaaaccaggaagagacctgtgccttgagaacttcgggactgtctagaactgcccagtcccctcatcaaaggtggccgagagattttaaagcaggaatgaggctgagttctctgcggccggagcctcagttttcgactcgctacaaagttatgaacacactggcagccaagaagtatttatactcaccccatgccatccagagagttgtttttgcataaaggtctcttttttttttttttttttttggtttccaaagggagtgtccccagcttgtgtacagttagctaatttatgactgtgactgccagggcctgtgggtgacctgatcttgctgttacatcactctgtgtggtgcctcttcacccaacccacctctttctggtcccaagtccaaggtggcagttcatcagcagggtggctgctaagacagaggcaccacggagccaggttttatttggccaagccacatggcctcactttcagcatctgggagattttttcctcagcagggagctctctggttaatccctgtccatcctctcacttttccagcttgtgacaggagtccaggaagctgggggaatattgacagtatggaacacactggaaaatgcccaggttccagaaggccagtgatattagatgatgccattattccagacaggcctctgaactagtcacttgaggtttttggaagggaaaggaaggaaggctattggcacagagaggcctctgagatgttggtcttactaacacctcatcctttagcactaggtaagctttggtggaatggcaggtaggattaaattccttcccttataatggaaatgatcacttcttacatgaaaaagtggtaatttcttataatttcatttcatttattttatttatttatttatttttgagatggagtctcattctgtcaccaagactggagcggagtggcacgatctctgctcattgcaacttctgcctcccaggct

SEQ ID NO: 482376 - DNA, 938 bp, Homo Sapiens
aaactagaataatctgggagtttaaaaaaaaatacttgtgcctggagttccatcttctgagatgtgagattcttatttaactggtctgggtgtcagaatttttaaaagctccctaggtaattctaaattcaggaaaagttgagaactactgcactggaggtttactggccccgctgttccatcttgttttataacaaccctgatgattgctgcatagcctgcttgggctccctcacaccagatgaccatgagcttggagttccgcctaagcctgttgagaagaacagtgtgtacctctgcttaagtcctctttacacctgtctcgggttggatttgctgagactagtttccattggttcaacttcatcaactttacatattccagaaattctccataatttctgatccactcttacattcccctcctttccagcactactattgatctcttcttcttcttttgaaaatctttgttccctccatctatcatttcagtgagatttggagagggaaaggaggtacgccaacaactggaacctgtagaacactctgttgaaaatttcacatttaaaaatactgctgactgtctgcattctttgcattcaaatgtggctgaaagtactgagaggcgagagaaccacatacagccagcattttgatgggcctcttccaaccactaaagttgacaaatcagacgatgtgagagactgggggatgggggaagagtaactggtagctatttagaaccttatgtaagtcagatttgattttctaagaaagcaaagctgaaaagtagcaatgtagccacgacctgcaattaaacttaaagactgaagtatcagtcatcataatcatatcaattagagtaccttagaacacagtaactttttaaatgaaagaaaaactttgaataaaaattacaagatggtcatcttaac

SEQ ID NO: 482377 - DNA, 1000 bp, Homo Sapiens
tttttttttttttttttttttttttttcgtataaaaacggcatattctttattttgcatactttaatttcagaacaaaatgaagaaaataaaataaaccacaatacacaacatccaatcctgctgtcaagagtagagagggaatggggcttgacacccttagtttactgccttcaacacaaggacaggagagggaaaaaaacactagacaccagcagggggagccaggtgggacaggggcactcgaggctgcagtgggagcccatggggacactatacaagggcacaagttttccaactatgaactcctaacctaatcgacttcttccatgcgagacgcatcctcatcgccctcgagaggggggatctcatcaggaactgcagcattgggttcctctgctgccacttcatcttcatcaatacctagacctagcttgatcatgcgatagatgcggttggagtgggtctggggatcctcaagggaaaagccagaagatagcagggcggtttcaaacagcagcaccaccaggtccttaactgccttatcattcttgtcggcctcagccttctgccgcagcgtctccacaatggggtggtcagggttgatctccaggtgctttttggccatcatatagcccatggtggagttgtcccgaagtgcctgggctttcatgatccgctccatattggctgtccagccgtaggtgctggtcacaatgcagcaaggtgaagacacaagtctattggagattgtcaccttctcaaccttcttatctaagatttctttcatgagcttgcagaggttctcaaactttgccttgctctcttccatcttcttcttctcctcctcatcctcaggcagctccagaccctccttggtaactgagaccaggctcttcccatcaaattccttgagctgctgcacacagtactcgtcaatgggctcggtcatatataccacctcgaagccccgtttccgcactcgctccacaaaagctgag

SEQ ID NO: 482378 - DNA, 1000 bp, Homo Sapiens; identical to SEQ ID NO: 308979

SEQ ID NO: 482379 - DNA, 1000 bp, Homo Sapiens; identical to SEQ ID NO: 308980

SEQ ID NO: 482380 - DNA, 1000 bp, Homo Sapiens; identical to SEQ ID NO: 120022

SEQ ID NO: 482381 - DNA, 1000 bp, Homo Sapiens
ccttttcacctcctggagtcctggacttccccacatctcccctgcccctcccacgtttccatagtccaagggccagagtaaatgaaaatacagcagccgcccaagcaatggggcccatgctggggcttcagtcatcagcatcttcactggagtctgagttagctggcatcataggatcatcaatgagtgagaagtccctttctgagctatcatagccctgagataagtcatcatcatcttcttcatcctcatcgtcatcctcctcaggttgcagtggtggcaaccgcaaggtagtaccagaggcggtagtcactggtgaagaggggtagccaggggctctcaagcctggatggtgatggtggtgatggtgggggtgggggtggtggtggtggtgatgaagcatggtgctggagtctacatgaggggatgatggtgcaccacccatcacaaatggcataaaaggcaaagatgcagaagtggcactgctgtgacccaaagatgacacagactgtaggccactactgctgtgttggaacgtgttatgcagagatagagacccagtgcttccaccctgcatgagggccatcatcttagaaaggtctggtcgcatcctacgggcccgcttcttgctgctctctggtgcaataggccctggcaaaacccggttgaacaccgtttcagtgtgatgaccctttttcccatttctagagttagctgtctgtactggttccattcccaaacagttcaattctgccttattattttttttacatctttgccacttctgttttctgcgatcctccatatacgctagaaatcggggatcaacagcaaactctggatgaccctgtaaccacatctccagttcagcccggcgaggggcatcctcacccaccagcaaagtaccatccaccttattgatgacagggatccgggtctccaggtccacatcaaggtgattaggctcttccatgcactccacctccagctctactagctt

SEQ ID NO: 482382 - DNA, 1000 bp, Homo Sapiens; identical to SEQ ID NO: 308982

SEQ ID NO: 482383 - DNA, 670 bp, Homo Sapiens
acaaaatcatcctggaacatgtcgtgagagtaaacaaagttattttgtaattggggccaattattttaaagaaaaaataaaggaatttaatttttgttttaaagtaacaaatacatttttaattgatctaagataaaaactatttggagaagattagtgatcattttagcccttaatctgttagaactgtatcctgaacagccttgagaaactgggtttactgtttatattcactatttcacatcatccacagtataagggaaaaaaaggcattgtatcagtttaggttaaatgcatggctggcaaccaaatccaatctcttatattctgtatttttttatttcgctcttctactttgttgatatcagctttcacagcatcttccttggcagtgtctttcagctcattccagcatcctgctttgccttgcctttgaggtctaacatcctgggccattctgtatttaagtcatgcacagtcgcttgtttgcagcggctgtagatgaacatcctctcatcatctgctggcttggtctcaaggtgcttaatatccttggcagctttctcaaacagcctgagacatactggcagttgttgcaaggattcctgggagcccactgagaaggtacagagcaggaagctattggaacttaatttttcaattgcaaaac

SEQ ID NO: 482384 - DNA, 1000 bp, Homo Sapiens
cagctggctttgaaagtgagtgaactatgagaggtgctctggccattcccctatatatataagcaggaggatgatgtcattgattgtacagacattatctttgcaggatgtgccctatcttcacctccatccctcccctctttgccctgctttctcctccccttttcctttgtcccccctgctctcctcccccatttctgaaccttgagtgaaagtgacgatcttccctaattgctgctgctgctgctttggatttctgacgcacagaaggagtcattcaactgcactgacatacagcatacatacagcatactgacaaagaacccccagtatcatccttttcccacttctcattcccccactccaaaagttgtcattttgattttgtgaaacatgagatctgttatttctaatttttaaggaaaatctccaggatgaatgcatgaaatcagtgattccttaggcttggaagttcttgaagagttagggtgcttctctggtaattcaaacttctgagcaaatgtttagtggttccaaaactaatacaggttttaaataatccatgctggaataagatggaatagagacagagaatcagttataaaaattaagcaattaagtttagagaatagaaagaaaatcaataaaaagaaataatagatccagggaataagatattatttcctaacaaatagaaaatattttattgtaagtaatgagagatgactgaactatgtgtgctgacttttggttgaatgtattagaaaaacaatttcatgtttataaaatccagctctaaattacttacattctagcaggtaaaaatttgtgttgttgtatcactgactttttttctgtacattatctctttttatgcctatatttttctgctctttttgaattcattcttgatgccatgtctcactctttgtataattcccttctcaacagtttttactattgcatcggctttctttccctgttataatactcttttcac

SEQ ID NO: 482385 - DNA, 1000 bp, Homo Sapiens; identical to SEQ ID NO: 308983

SEQ ID NO: 482386 - DNA, 1000 bp, Homo Sapiens; identical to SEQ ID NO: 308984

SEQ ID NO: 482387 - DNA, 1000 bp, Homo Sapiens; identical to SEQ ID NO: 308987

SEQ ID NO: 482388 - DNA, 1000 bp, Homo Sapiens; identical to SEQ ID NO: 308989

SEQ ID NO: 482389 - DNA, 1000 bp, Homo Sapiens
gctccagcgaagcttgtgtaaagcctcaaatctacctgtgccttcctctctttctctgccgcgcccgcctccccgcccagccgccgcgtgcctccggggtacctgtccctgcagcaggaatcgatgctgagctcatcgatgccccagtactggatctcctgcaggaaggagagcgcgcacagctgctccatgacatgcaggcggccggtgcggtagtagtgcaggacatatcggaacgcctgcgagctgcggtcgaagaagtactcgttgtccacggggttggcatcgtcgcaaagctccagagggctgggcacggcggccagggccccggggcggcggtaggaagccaccaccacggccagcttgccaaggcgcgtgtgcgggaagcaggacagcgcctgctgcgagagcacgaagcggctgccgcccacgttgaccgtgaagcagtccccgagcgccaagggctccccttcaccctcgctgcagaagacactagagtccagggaggtcagggagccgctgtccagcggcgagtccagcagcgctctgccgctggaaggcatctctaacccagtcgccgcggcctgagggcgccacaaagttggggacacgccggaagctttggtcccgcgagggcggtggcacggcccctggtggcggccgggattccccgggctcccgaaggggttacctctccttggcgcaccctctccacccgctgtgcgccttcctcctcctgccgctagggagccgggagtgcgcggaagcagcgcacaagtggcagaaagaggagacagggagcagaggaagggtcgcgctaagagagaggatcaggtgaggtccaagcccgacacagtccctgtgcacactgccggtcgccctggcccttcccaaacgttgtcaccccgcctcccaacttcgcaattgcgattcccagcccaggaggtgtacagattgaatgactcgctacttggtgggtggaggggttggggaagggagg

SEQ ID NO: 482390 - DNA, 1000 bp, Homo Sapiens
aaagtataaagtgttttggaaaaaaaggaaaaaaatctatataaaaatctcttcacatataaaatcctgaagaaggtgcaaggtgagacccagtgcgaggggcgtgctcagatatgcagtgtgtgtgtgtgtgtgtgtgtgtgtgtatccgtgtgtacatgtgtgcacgtgtgtgcgtatgtgtctgtgtgtctgtgtgtgtgtgtgtgtgtgtgtgtgtgtgtggtgggtggttctgttaggagaggaggctctgggatcgtcccgttgggcacaggatgttctggggttctcttgttggatggttctgctgggagaggaggctctgggattgtcccgtagggcacaggatgttctggggttctcttgttggatggttctgttaggagaggaggctctgggatcgtcccgtcgggcacaggatgttctggggctgtcttgttgggtggttctgttgggagaggaggctctgggattgtcccactgggcacaggatgttctggggttatctcgtgtggctctattgggagaggaggttctggaggctctgggattgtcccgctgggcacaggatgttgtggggttgtctcgtgtagctctattgggagaggaggctctgggattgtcccgctgggcacaggatgttctggggttgtctcgtgtggctctattgggagaggaggttctggaggctctgggattgtcccgctgggcacaggatgttgtggggttgtctcgtgcagctctattgggagaggaggctctgggattgtcccgctgggcgcaggatgttctggggttgtctcgtgtggctctattgggagaggaggttctggaggctctgggattgtcccgctgggcacaggatgttgtggggttgtctcgtgtagctctactgggagaggaggctctgggattgtcccgctgggcacaggatgttctggggttgtctcgtgtggctctattgggagaggaggttctggaggctctgggattgtcc

SEQ ID NO: 482391 - DNA, 1000 bp, Homo Sapiens
tttttttttttttttttttttttttttttttttttttccgaccaatatggtttatttctgccccagccaagcttctttggaccctggctgggggaaaggcaccccaggcaccggcaagttccagtcattgcagatcctccaggtctaggtgtgactggtagtagcctgggcactgttgctggacgttgtattctccttccttcttccgccggcgggtggtcaccaggacaccgcagatcaggcatgtgatgagtcccaggagtcctgccaagccgatgaggatgacagcccagaagggaaggtcagaattcccagttaagggctcatttctgttgggagaatacccatccacaaggacactgctcctgtccagggtgaagttctgcagctgggtaccattccgggtcatccgcagaaattcctcatagatggcaactctgtctactctccgagccagtggcgagaagttacacagggagtccaccccggtgtggtgcctgttggggacagacctgaatgttgaaacttgacagtcagaaaaataactcttgatgctgctgtttcggaagagttggttgagcgcatcctcaatattccttttgttcctctggtaattggtggtgcctggctgggctttgtcctgggaatatggtaggttggtgatggtgaaattcaggtagaagtgctgggtgctggagctgcttgttggttgataaactgatgactccatttctgtcacatggatgtccaccaactggtaggtggagcccagccaatggaatgaggcattcagggtcttatctagaaagacttgctccaccaggctggggtccaaattggaggagaacaatgccttgacagtgaccaacacggagtccatcgtcaagttggtgaccaggcagaagcggaatgtgtcatgtagttgactgcctttgtagagtgtggtgaccttgtcctggatgtccctcagcagggtgatgtactctgaggatgtggggtc

SEQ ID NO: 482392 - DNA, 1000 bp, Homo Sapiens
gatccggaacgttccagggcagtccctgccataccccaaacagcccctttatgtggtgcccactgtgggtcctgggatctcccaggcttggatttaaatcctgactgtgctccttagctatgtgaccttaggccagtgactttgcctctctaggcctcagtttccccatctgttaaatgctgttaatgatcattccaacctcagcgggtggttgtgagacggtgaggtagctgccaacaatgtggtttcctgagggctcagatgagccaggcacttggtaagccctcaatacgcctgcaatccccccacaatgcaccccagacacgcatgcagacacacccctgcctcccactagatgacacaaccgatcatgatggccactgcttttttgtttgtttgtttgtttgagatggagtctcactctgtcaccaggctggagtgcaatggcgcgatctcagctcaccgcaacctctgcctcctgggttcaagcgattctcctgcctcagcctcccgagtagctgagactacaagcatgtgccaccacacccagctaatttttgtaggtttagtagagatagggttttgccatgttggccagactggtctcgaactcctgatctcaggtgatccacccaccttggcctctgcaagtgctgggattacaggtgtgagccgccgtgctcggccctgggccattgcctttgaacaaagctctgcaagctctgggctacgagcggccgtggtgtccctgttggaagttctcacatagctctgttcaccagaagggacgcctggtggtagacaggctgggatccagacccagtgagggtgtgcccgaggccccataacagcctcttggaaacacacacttttttttttttttttttttgagacggagtctcactctgttgccccggctggagtgcagtggcacgatctcagctcactgcaagctccgcctcccaggtccacaccattctcctctctcagcctcccgagt

SEQ ID NO: 482393 - DNA, 1000 bp, Homo Sapiens
gatcctcccgcctcgacctcccacagtgctgggatcacaggcgtgagccgccgcacccggccctgtccagcttttctagtggacctcagcaagagagtgggtttgtccttagctgctaatccaccattgtgcaagccaaaatctgccaagagagatttttaacccaaagtccaagtcgtttagaaggaggtcatggatattctagatcctcttgatcttggagccacaggatgacaaatggggacccatcctcagccttgagaggagccctctcatcttccagctgaggaagccaagacccaaaaaccaggagcagagccagagtgcgagcccggattttccatttccaggcaggcaccgtgtggtccctcttcaggagcaggtgtcagcccttatcccttgaacaagatccctggcaatgacctcacctctccctgaaacctgaatgttctgtcagttcagcaagaggctgatgcaactcacagtccccagaggcccttttgtctctcatcgagtccataaatgacacggaaatgatctaagcatgactggtcaccctggacttctggaactcatcacggagcttacaagactctcctctcacctttaccctatggctcagaagaagaagggatttgcccaagctcatgctttaagttcaacaacacaaaaatgggccgggcgtggtggctcacgcctgtcatcccagcactttgggaggcccaggcaggtggatcacctgaggtcaggagttcgagaccagcctggccaacatggcaaaaccctgtctccactaaaaatacaaaaattagccgggcgtggtggcgcatgcttgtaatcccagctactccgggaggctgaggcaagagaatcgcttgaacctgggaggcggaggttgcagtgagccgagttggtgccactgcactccagcctgggcgacagagtgagccatcatctccaaaaaacaaacaaacaaacaaaaaaacccaccaacacaaaa

SEQ ID NO: 482394 - DNA, 538 bp, Homo Sapiens
agggcccttcgacacctccagagtgggcacaaccggcctgcccccgaccatgggaccggggccagcagggagggagggtctcacctcggaagctctggctgaacctctttccgcgggagcggtccccgtggctgcgccgcagcaggactacatactgggccctcacgtgggcggggatgaccagcttctccatgtcggccctgtccagtacgggcacctcgctgagctgcagctgccgcagcaggctgcccaggagctgctcctcggtcagggccgccccggggccagccaggggcagcacccagagtgcccagcagagccacaggggccacatggtgctgccctgggggagcaggaggcagagtggggctgtcctctagggaggttgaaggagggtctcaggcagctgggtgtgctgagagccaggctgggccagctttatagctggccctgggctggcctggggtgaagggaagagggagggagggagggagggaggtcacacccctgggacctcctgggagctcacagccagaca

SEQ ID NO: 482395 - DNA, 1000 bp, Homo Sapiens
gatctccagtttcatccatgttgttgcaaatgattcattcttttttatggctgaatagtattccattgtgtagaagtcctacattttctttatccgttcgtctgttgatggacacttagattgctgccagatcccagctattgtaaacagtgctgcaaataaacgtaggagtgcaggtatcttttcagtatacttattttccttattttggatatatacccaggagtggtattgctggatgatatggtagctccatttttagttttttgaggaacttccaaactgttctccataattattttactaatttacattctcaccaacagtgtaggatggttcccttttctttttcttttttcttttttttttgagatggaatttccttcctgttgcccaggctgtagtgcaatggcgcgatctctgctcaccacaacctccgccttccaggttcaagcgattctcctgcctcagcctcccgagtagctgggattacaggcatgtgccaccatgcccagctaattttgtatttttagtagagacggggtttctccatgttggtcaggctggtctcgaacttccaacctccagggatccacccgccttggcctcccaaagtgctgggattacaggcatgaggcactgtgcctggcctggttcccttttcttaacatcttcgccagcatttgttatcgcctgtgttttggatataagacattttaactggggtgagatgatatctcattgtagttttgatttgcattgctctggtgaacaatgacgttgagcaccttttcatatgcctgtttgccatttgtatgtcttcttttgagaaatggctattcaaatcttttgcccatttttttattattagattttttcctatagagttgtttgcagccccgtgtatattctggttattaatttcttgtcagatgggtagtttgcaaatattttctcccattccatgggttgtctcttcactttgttgattgtgtccttt

SEQ ID NO: 482396 - DNA, 1000 bp, Homo Sapiens
acatttttaaaattaatttactatgtgtttttcaccagtactctttaaaagctccccaggagatacaaatgaaaaaccatactatggtgaccaccagtccggggttacctggggctttcccagttttagcactggaagtcccatggcccaggagccccctccccgcaaggcaaactgagacacttggttgtcccctttctagaaaggaatggacccatattttctaatcccagatcgggacacgtggcctgggcgcagatggctgaatcaattctctgaaagcaccacttggggcagtgggtcactgaggccacagggtcagtctgtggcaggagctgggttcagggtggggagaggtgggcaggagagcggctggcagtggctcagtcggacaggtccccatcgttgggccagctggggctccagccactggccgcccgctccatggccttcacccagcggcccttcagctcctccgtctcggccttgaaggtgtagagctggcctgactgctgtagctggaagacccgagggtccccctggggcccaacagtcacctggtagcccagcagggggatggaggtgtgagccctcatgtcctgaggggcagcatagacatagagcacgagggggtcatcccgagggatcacacaccagccccgggggccggtcttgccccacttgtccccgatgagctgcaggaagctgcacatcaggctctggtcaggcgtggctgaggaccctttctccaggatgccccgcctcttgtcctccttggcctcaggcagcacatttccagtgaggaatgcgtagcagtggaggcagactcggttgggcctgttgtcgtcgtatttcagttcggcccggtagtcggagcacctggcacacaccacctgaggaggacacataagggggcatggggctgagaccaggcaccggagggctgggctcctgccttggtgggcaggtgggggcatgagagcaaccagggactggggga

SEQ ID NO: 482397 - DNA, 1000 bp, Homo Sapiens
ctctatacaaggctgtttatttctgtacaaaaccatgtttctattttacacaaagaacaccccaccctttcccctcacaccagcaccctaaccctggggagcatcccccaggaggagggggctgaaggaggccccaccccccaggccctagcttctgcctgccctggctgggccagcctgagtgccactgtaaagaaaataaataaggaggctcaggcagaatctgtgttggaccaggcagaatctgtgttggaccagccagactccagcccagcccagtggccaggcagcttggccctcagagggtgggcaggatgtggaatgtcagttcatgaaccgtgtagttatatggagaccccgccctggaggccttagctgccagggttacaagtaggtgtcctcactctcttgggacgtcaagctctcctgggagcggtggtgggctgagacctggggagccaaatcctgaggggctgagtccttgggggctgagtccttcgggggcacatgctgtgggggacatgcatctcctgcagcggccaccaccatggcttgatttggggctgggggcttctccagctgccctctccccttcatctgtttccgctgctccttctgggcctgcttgggtggcttgggcttggctttggagccagggaggggggcatctaggggcaggtggatggatggtgaaggttgtagggcaggccggggaccaggttctgcatccaagatagccttggcaccatgcagcctgggcggggagcggcactgcagctcaccccgggtctcctgccagcgccgcagctgaatgaggtgttcgcgctcaatctggcgctctgtcacgggcaactccaccacctcctggaccagaaaggcctcctgcatgatcttggggctgaggctccgcagtcgctcgatggtctcgtactggccctggcaggcttgaccttctcaggggagcccagcgcgtgcttcagcagcaccagccccacccgga

SEQ ID NO: 482398 - DNA, 1000 bp, Homo Sapiens
ctattttgtaacaatttatttaagtttaaaaaaaggaaaactgctgccccccaaaaaaagaaattttcaaaacaacgtggctggcgtgattgtatctgaaagggtaaaggaggaggaaagctgagacgcctgcttggtagcagagttgggtgtgggagtgtccacagacacccctgtcctgcagggtggggagtgggcacctgtggccccaggcaggttccttcccacagctgctgggcttctgggcctgccctggtgcctggaatcacacatgacagggtggggaggacaggggcagtaatgccatttgcctgcctgcattctcttgtcctgagaatggccaggtcccctgtcagcagctggttggttggcctgtggggaaggaaggagggtggagttgtcctcatcctcatggctttggtccctccctccctccccattcctccaaggaacagggtctgtcttggccgccatgacagatgagaatactgacgctcaaagcggttgagcagcctgctccaagtcacacgatgacaaagaaccagaatctgaatcaaatgggtctgcctgttgctccaccctacccaaggcagctggagtgggttagaacggcacgttctcactggagagagaagggtcctggagaggcagggtttggcaggaggccccggggccacatacttatgttggccaggcagcttccaggctcagcctcgggctctggttcctcggcgaagtagacctgccagtccaaactgctgacccagtcctcataggcagggagcgcggtgaagaccgccggcctggcggggccttggcaagcatctccgaagctgtgcagcccggccaggaaccatgtgcccctcacctcatgcaccagtggtgccccagacaggccctgtcaggggtcaggtgacactgggtgactttttataggcagctgtgcaggacggtagagcaggctagggaacctctggctgtttgggggctaattggcaaa

SEQ ID NO: 482399 - DNA, 1000 bp, Homo Sapiens
caagctgggaattaggcaaacctgcctcccgttttatttctaaataacatagttacaatgataagaagctacacgcctccctcataattagcgtccagggaaattccttgtggacaaaggacagacggaactggaagtcatccctctggggctcccctgagacaaacgcttatatgattgccccgttcccttactgtttacataaaaatgcggattcactgggccagactcaatcgtgtattcagtggaaggctgactgaaccaatgtacgccatacacatactgatcttgtgtctccctaagatgtataaaggcaaactgtatccccagccacctcaggcacctgttgtcaggacctcctgaggctgtcacaggtgcatccttaaccttggcaaaataaactgagactggtctcagatatttggggttcacaaaggcgtgagacggcagggtcctgaggtctgaggcgccgtgggcgaggaggagggtcctgaaatctgaggcgccgtgggcgaggaggagggccaagcacacgccagggtcaggtcctgggcaggtggaattgtgcagtccccctgcgtctgcaggtgctgtctgtctggcttgggcagggttgggggaggaccgaggccagagccatccttcctccaggcacttgcagggccaaccggagattctaggcctggcctgagtctgcgcaggtgctagtgggaccagaggcacttcttgggaatggattctggaggtgtcagacacttccctaacttttcacagcccggaggtgcccagttcatgaccgcccagttgcacacgttgagctggggctgcgcggggaccaaggcctcctggtgctgctggacgaccgaggtgatcctgctgagggcctcctggtactcggcgctggcaaagctgagggggaacctctcccctgggtcccgtcccaggtggaagatcaggggcagcttcgtgtggtcttccagattgtgagttgtgacccctg

SEQ ID NO: 482400 - DNA, 1000 bp, Homo Sapiens
gacatttaaaatccagcactttaatctcttgttctctgtgaatcactatgagaagtgaatggttttaaaggctgtaatgctatgttggaaattggtttgttttgccttttattgaaaaggtaagatcatgtgattggaagaacacaactgttggcttgggaagaggactttgctgctgaagtgttttctaccttctgagtgtgtttaaggcaggatttggagggaaggaccagcttagggagagtgtctgagccacagcgtcaggatgggggaaaccacatgggatccatcaagttccagttgaacaggagcaagatcagaacttaggagggcagtgtcagctcccttgttggctgtcaaggaacaccgatctagtagaaacccacttggttgtgacccaggtagaggtagatgccatacatttgagatatgcgtccttaaggaacctgacaagcagactgaagggatggtaagtgtgacagcctgataagttttctcaaagcccaggatacagagccagtgttttctgtaactggagacctcagttaggccaacttcgaattccagagcaacgtaggaagtctattcagcagaaactcgacattgttcagtgtgtattgctgtgcagggtgcctattgtgacaggacacaaatgttactatgttttaatttgctatatttttgaatgggtaaagcattactttacttctcttggttacttgtaccaccattccacccctatccctagcctgccccacaaatctaatattaggaagcctcttaactgaaaccaaatgaacatttgggtcaggtgccagatgtctgctgcctagaatagctttttctaggtgtctaccaccttgaatttatctcttaactgtgtgttcaagtctttgtcattgaaactagtttttcatatcttagattcagttgtgtatgatttaatgtcccttattaggagtctttaggcagggagggaagaaaaaacagatttgttcat

SEQ ID NO: 482401 - DNA, 1000 bp, Homo Sapiens
cacttgtgtacatatttacatttatttacaaaagtatctacatcatcagtaaaaacaatttactgacaaaaaaagcaagcacctagtcatataataagttgatgacagccaaaactaatgcttgttctttgttagtgggtatttcttcttaaagcagctgcttcaagttacatttccaacagttgttcaaaaattgtaatactcaaatgagaaatcagatggctttttagtttttaaaataatttagttatgctgttgtcttcatcttctgttaccaatcaattggagctacaaaaaaaaatcatattattaacttgtaaaatgcagtaaatctgggctgcagaccaggagtcttaattaccctcctattctaaagtgaatagcccttttgtaataaactcatcaaagccaagggagctagggagcagggatggaggaagaactgccttgagtgctcttgggatagtagtctgagtaacacttgaagaacagccttcaggatgctgcactcaatagcagccccaaggctcctcccgcttactctctgagtataactgaaagattgaacaacagagctgagactgttagacccacatgtaaactgtcacccatttgtaacagctacttccttctttgctacatgaaactcctggggatggttttcttcctacctcaaacttaccttcctgtttagtcacctctgtggcaacgacagaacaatctctggctgtcttggagtaaatcagccgaaaaacaaaaccgcatccttgagcaagccctcaaaccgagtccatttcccggcctcctcccccgtggtctgcgtatttccacagagctcaaaatcagaccaggccagagctccccaaacatttgtatctcattggtaacaagaattcatgagaaattagtgctgtggtcacaggggtgaggtaaaggacagcaaactagaagtttccctccttgggagcctcacagaacatgaaatgggtgctgtgacttt

SEQ ID NO: 482402 - DNA, 1000 bp, Homo Sapiens
ctgcagggaggagaaatgagaaaggatcttttagtgcaaagatcaggtcagaccactgttctgctgagcagcaccttcagggaaacaagaacagagaggacaatagaggggtgcttcaaggcaaatggcatcctagccagcattggcagaaaccattcctcaacatggcaagaacacagaacagcttctggccctggaacacatgatgcagatagggataatggacctcctgagtggtaatgtgtgtggatgatgattgaagataagacaggtgtcctccatctccaacaccttgacactgcattagctccaagaaccatagaacaaccctagtgaaagggggacctcaggccagataattttcattcatacattcagtcacccattcatttatttagatacctctccagaatgggagctaggcagggtccaaactgagtttaattttttaaacgtatttattgagtgccttctcccacatttactacattccttaacagctgcctttaatattatttttaaagcattatctctttcattctgctctgtcaatttctacatcgttgcatttgctagacaactgcaattattctttggggcattaaatttttttcttcaggtcatcgtgggtggaagtctttttataatatgttgcactcatctctgccttcatatgcagaaggcacagaataccacctcaccttctcaataacgctgagtcatcattatggatatccactaaaggactcggcaataagtacagtagtgccagcctttctgggtcttcacactgcttagctttaggaggatatcgtatttctttctatagtcttcctgtcagctcccttgctctcattgtcaatatttaatttttgttacgcctattggtccatgtctaccttcttcctcttgacttcccccacagatttttttttttctttttgagccagagtctcgctctgtagcccaggctggagtgcagtggcgccatctcagctca

SEQ ID NO: 482403 - DNA, 1000 bp, Homo Sapiens
gttctgagtgcatgaatcatttagtaaagggggccccagcctgcccacaaaaagaggtctctgtaatggatggtcagtgcattttattgaatcagcacagtacaaaaataaataaaaataagggaaggggaattaaattacagccaaactgagcttcatgactttgtcagattataaaccacacatactcacaaacacactacacatacatacaaaatgagacaaatataaattaatattaacaatacccacagtttggtcaaagaatagctacagaagaaattgcactaaaaaaccaacatacatcacacgtgtgtaattagcagtttcaaatatacagctatgaataattctgagtgaaaaaaatggcacattttcttttcattgcaagtttaactgttggaacaaaactaagttctaataactgcatggaaagaatatatcaaccctccaggtttacaagaaaaagagaaaaaccaaatcctgaactattattcctgtggcttgttctgtgcatgggtgtaattttcacagccatctgttctaagattatttttcttaagacacaaaatgctcctggtttgcatgcacaatatcaccgtaaaagcaacaattaaagaataaaggtttttttgtaggtttttttttattgttgatctaaaagtagtcttcatagcagcatggcaaatgggttctttgcttgcacactcaagtatatcagttgttcctttacacaatactgatgaccagtgcaaggggagagaacacgacaggcttcacactgagggaactagagagttcttcccttagtccccaccacttccgaaatgtccacctcctccgaagaataaaaaaataaatacggagaaagagaaggaaacagacacgcaactggaatcctgtggatgcaacgtaactgcacagttcgcagccaggttccgccagctgagggtgatacacacatgcgccctcctcctgagacttggcactgaccctccct

SEQ ID NO: 482404 - DNA, 1000 bp, Homo Sapiens
ctccagcgtgtctggaaacagcctacacacccaccctctctttgattaccctgatccccaaactctgctggaagcagctgggggagtaactgcgctgagtgtgttcccagagctggaatcctggaaggagctggatttggggttcacagctggaattctagttcaggctctgccgagcagcagctgtgtggttgggctcaccccttgtccttttctgagtcaccttatcttggaaaagtagcgttaaagcaagactgtgggtaccacgtctgcttggatggtccatgataactcagagagaagacaatgtggttcaaggagaagaagagggggccttacctggctgagcgagcccttggggaatgaaggtggctgctatgagcagcaggcacagaagggcggcagagactttcatgctggaggcgagagtgcgagcttcagtttgagaattggatgtttctgggttagtctcagcctctcggttcctctggctgctgtctctgcctcttattgaaagcgggcagagggagagagggcggagtcaagcaggaggagggatcttccatgagtgataagtgggctgttaaatctgctgagcaaatgcagcatcctgtggatttccaggaagtaggaaagggaagcagggggtcaggacgagacactttttccattcactgctgagaccaaatgagcaaatggggaggatggggtgccattaagcccagactgaccacagatgtgaactaagagggttatttttaaggattctgctttctgtgaagcgaaaactgcagaaaaggaaggaagcgaggaaactagatgaaagcatgtcaggctcgctgccagcttaccttcaggccacattccaaggggcctcccagccaggaaggagctctcaagctttggccggctccctgacaatgcattaaatccatttgctcattcaaatgcagaatagtagcatcatagaagcctagcagaactgtaggattgtgtaaac

SEQ ID NO: 482405 - DNA, 1000 bp, Homo Sapiens
ccctaagtgtctggcacggactcaggtgtcccttgacacttcaaaggatacccctgtgccctgcggggacggtgcatgctcaccggcatgctggagcaggagacagcctggcctgtaagtttcttgctagcaaggacctctctgccatccgctgcttggactgtctgcacagagctctggaggaattcaactctgggcgtcttggagaacttcagaaataagttaataaaaaggatacacagaggctccccagctggctcctctgcaccggtgagcatcgggaaagccatgagggctgagggctcagctgagtgcccgtggccgcagagtttttggatcctgcagagcgtgatctgttgggcatcaaactctgccagagtcaagggagcgggaggctgagggtcagggtggagtagctcagcccctgggcgggagccatcccttctgtcagaagaatgcagtcgactgtctacccatttccctgagctgttcgttctttcgtgtgtgtgtgtgtgtgtgtgtgtgtgtgtgtgtgtgttgtgcgtgcaccagagtggatggtatagacaagagtctccctatgttgcccaggctggtctcaaacacctggcctcaagcaatcctcccgcctcagcctcccaaagtgctgggattacaggtgtgagccactgtgtccaagcttttgtgaacgtcaggttgtgtctgagcgtacaggtcgggagaggacacaggagccgggggagaaaagaggaagcagcagccgcgggctgttgagtgatgacgagctgtctatgaacattttgccaatttgaatgaacttagctgccaaaaacaaaaaacaaaaagcccggcaggtcaggcctggccgaggggagggagccgcgggctgtgttgctgagtgctgcatgggtgtggtgaccgagagcaagacggaggagtgctgcgtatgggactcggctcatttactccaaacagctgcctggagaggccatgggtcacc

SEQ ID NO: 482406 - DNA, 1000 bp, Homo Sapiens; identical to SEQ ID NO: 308995

SEQ ID NO: 482407 - DNA, 243 bp, Homo Sapiens
cccctgaccatggtctcatgcccagccgaaatctcagattgacagtgattttagttggtgagtaattgccttgtctaggagataggcacttgcaactccaggaagacttagaatttagtgaaaaaatgtttcagagaaactgacctgtggaattaattttgtgtgtgtgtgtgtgtgtgtgtgtgtgtgttaagtaacttgtagaatgttcgtattttgtatccttgtaatagctgagagatc

SEQ ID NO: 482408 - DNA, 1000 bp, Homo Sapiens; identical to SEQ ID NO: 308996

SEQ ID NO: 482409 - DNA, 1000 bp, Homo Sapiens
gatccgcccgcctcggcctcccacagtgctaggattacaggcatgagccatcgcactgggccctttccactttttaaaaatggaaaaaccattcttagctcacagccctacaaaaataggtggtggccggattcggcccaggggctggagttcacctagcctgcccaggctggtgcctgagtccgcgcccctcactcctctccctgtgggtctgtctcagccccgacacctgggcagcttcccactgggttcgtcattgagaggctctgggcagggggcgctgttgcttcacttgggtgcccctgagtcacccagtgcctgcttggggtctacagggtacagcaggacccagactcgtcactgcgcctggggacccagatttggagtgaaagtctgagttgatcagttcaacacaggcaaagcataaccaacatagaggctgggctcacgcctggagtcctggcactttcggaggctgaggtgggaggatggtttgagccctggaggtggaggctgcagtgagctgtgatcgcaccgttgcactccagcctgggcgacagagcgagaccctgtctcaagaaaatacatgtgtgtgtgcgtgtgtgtgtatgtgtttgtgtgtgcatatacatacatgtatgtattttaggatacagcattgcgtttccggcctccagacctcccaacaggcgagcccagccagggcgatgtctgtgggcaggcagggagtgtggaagcttctgctggaacagaagcgcctgccttggggcctggctctgtagaaacagaccctcctggagctcacagttgtggcccatgagagtcagggtgccgtgggaaggccagctgggtgcctgcataggaacggggtccccgagggcttctggggagagaggggggctggccaggggcatccatgagccccctgaggcagaggcctgctttgcccgcccccgtgagtctgtggcccagccgccctccacgacttgccctcttcccc

SEQ ID NO: 482410 - DNA, 1000 bp, Homo Sapiens
tttactttgctatggtggtcctcattaatgccttataaaagggtggatggatggttggttgtacctccccccattcccaacttagctgcacaaatctagggtagcaggacagggctccctcaaagcagcacctcattcttgacggaaaaggtttatgactcaatctccccctcatcagccccaacacccactccactgccccatgggactgcgatctggggcatggacaccctagtcctcatcccagtccagcccacataaagtagatcgctaagctccagagcaaaaggactctcaatgtcatccccacctctatcccaatggctgagcctcacttacctttacactcttggggtcaaaggcaggttccttgggagcctcaggagctggggcaggggctggtgcaggggctggagctggagctggagctggcttggctgcctccttcttaggctcaggcttcttgggagccatgttgtcttgttgggatctttggcagaggagtgatctaagaagaaaccgagagacgtggcgtctgggagatgagataggagcctgggctgcctcccttcccttttatcctgggcaggagccccacagaggggctgggtgaaagcaagagcaactgctgctgactataaaaggaagaaacgccagcagggtacagctgacaactgtgtattgtcaccaggtttggggccaccagccccctccccttcatgccacagctctctcttcacctctaggacaggctgatcccttcttgccaattggtggaaacccagaaggaccagggaaacagaccttctcaaatatgccggagcagccagagagatgagctgacttgagcagttgataagcctcacacaaagcccaggggagggtgaggctttttttagcccctcccgagcagaggcagcccactgcacattccttctaagccaagatcctttaagctgagagccactctgggccctcagctctgcctagaggcccaact

SEQ ID NO: 482411 - DNA, 1000 bp, Homo Sapiens
gctctcatgcctccgcctccattctacccttagggctcctcagccagatctttggctagaaccatggtcaagggagatgcgattccggctcctgtcacagacgcttaagtgtgagcgcaacccagcccgcctcctcctccacgcccctcacactcacgtgtcgtgggaaactggagtagccaaagctcagaatccccagtgaatacccttctggggatgggagacggggccagctaggggccggccgcagaccccggtcccagagctagtttcagaggccagcgttccccctagcgcctcgtgtgccccactctgggaaccggaaacaggaagcgccaagaggccgctgggaaccgtcctcccaccagaccccgcggcatgtgaccatagaaccatttcgcccctttccccttcccgggctccctgataatcttaaactctgattggccagtattctgggactttagctccgccctcgttccatcagctccaatcactatcgaggttgtcgtttcgccttttctggttgcctttctttcaatggggtcccagagtcccgcttccagggcctctcggctcgcgcaccccggtcacgcggggtcacgcgcctgacgctcccgggtagggttcgagtgaagagggtgcgaggggcaggtggcggaagcggaagttacgcaggcagcctgcctcgggtccgcgggagttgtagttctcacgctaggtctctcggcgcttccctagcccgttcgccgcctgagagggacgctgttccgccgcgtggaagcttcgagtctcgactccactgttgacccctagacgagagtagtgcagcgacggggccgtgatgtgcggtcctggctttcttaacgacacctctcctctgtatttcctttttccagttgagtaccttggggtgaattattattgttactgttatctctgtcgttccttactgcttcgtggtattttgcttgataagcatgctctgcaaccacctctg

SEQ ID NO: 482412 - DNA, 1000 bp, Homo Sapiens; identical to SEQ ID NO: 308998

SEQ ID NO: 482413 - DNA, 1000 bp, Homo Sapiens; identical to SEQ ID NO: 308999

SEQ ID NO: 482414 - DNA, 1000 bp, Homo Sapiens; identical to SEQ ID NO: 309000

SEQ ID NO: 482415 - DNA, 1000 bp, Homo Sapiens; identical to SEQ ID NO: 309001

SEQ ID NO: 482416 - DNA, 1000 bp, Homo Sapiens
gatctgtcatcctgtctcttctcttggggctgggggaatgggtgcatgcatgagctttgaggtggtccataaacctcttgaaagtgtaagcaacattgcattattattattattattattttgtgtgtgcattgggcagaggagaaagtctattgctttcattgattttccaaacttggctatcagaggctaagatctcatatgtttacaggatccagggccccattcaatttcagatgccccattcactttcagctggaaataactgagctgccattcatctttcctggactcccctggattccaatttgtaagtggcccagctgtaaataccccatgggaagtctgcagctacaggtcaaatttggtcccaagcagaaaattcagaaccacaaataagcagttcagcattcctgtatgcctagaacacatgtttctccatagtcttcgtccactaggaaggactttcctgggcacctgtgcttagtatttttccctaatactcagctaaatcagtgcttttactctccagtcatggagggaatattaatctagagttgtttttaaaaatttagttaaaagatataattccactgtcttttagaaaggtaaagacaagcttcctttggttatggaagtgttacaggatcctaacacttacccaaagttaacctttgggttggggatttcctcactgtagtcccttctgcggtcgccggaaagatgttacagaaaaggggtccccatccagactccaagagagggttcttggatctcgcgcaagaaagaattcggggccagtccgtcgagtaaagtgaaagcaagtttattaagaaagtaaaggaataaaagaattgctactccatagacagagcatccccaagcactgctggttgcccatttttatggttatttcttgatgatatgctaaacaacgtgtggattattcatatattccctttttagaccatagagggtaacttcctgacattaccacggc

SEQ ID NO: 482417 - DNA, 1000 bp, Homo Sapiens; identical to SEQ ID NO: 309002

SEQ ID NO: 482418 - DNA, 1000 bp, Homo Sapiens
gatcacttgaggccaggagttcaagaccagcctgggcaacatagtgagaccccaactctacaaaagtaaaaaatgttaggtcgggtgcagtagctcacacctgtaaatcccagcactttgggaggctgaggctggcgaattacttgaggtcaggagttcaagaccagcctggccaacatggctaaaccccctctaaaaatatagaaattagccaggcgtggtagtacctgcttgtaaccccagctactgggaaggctgaggcaggagaattgcttgaacccgggaggcggaggttacagtgagccgagatcacaccactgcactccagcatgggcgacgagcaaaactctgtctcaaaagatacatatatatatataaataaacatatatgtaaataaatgtatatatatgtaaacaagtatatacataaatatatgcaaaaataaatatatataaatatatataattttaaaaattcgcccaatatggtggcatggccctgtaatcccagctatttactgtactcccaaatactgaggtgggagaatctcttgagcctgggaggttgaggctgcagttagccatggttaggccactgcactttagcctgtgcaatagaggaagaccctatctcaataaaagaaaaaaaaaaggccgggcatggtggctcacgcctgtaatcccagcactttggtaggctgagacaggtggatcatgaggtcaagagatcgagaccgtcatggccaaaatggtgaaatcctgtctctgctaaaaatgcaaaaattagctgggcgtggtggtgtgtacctgtaatcgtagccactcgggaggctgaggcaggagaatcacttgaatcacttgaaccgagaggcggaggttgcagtgagccgagatcgtaccactgcactccagcctggtgacagagcaagactccattaaaaaaaaaaaaaaaaaagtaccccagggagttttcctgtgtatctagggtttaaatggcctg

SEQ ID NO: 482419 - DNA, 1000 bp, Homo Sapiens; identical to SEQ ID NO: 309003

SEQ ID NO: 482420 - DNA, 1000 bp, Homo Sapiens; identical to SEQ ID NO: 309004

SEQ ID NO: 482421 - DNA, 1000 bp, Homo Sapiens
  misc_feature (807)..(807): n is a, c, g, or t
caactcacccctagggtgatgagttctgtagaccctccaccacacagcttcttccagaaaagcagacccaagtcagtcttgtctaggataattcgaataggctggggactggctgttatgcctgtgtgcatgtgactgtggctgcaggtctggcaagggtggtctggagggctcctggaggttctcagaaagtcaattctttagatctctcctaggccaggctagtgctgggaactggtaggtcccacttacagcaccagagaggattctggccttaatttctgattcaatgtgccccagtctctgcagcttgctgggtaagcgtctagagccccagaacttcagcagatgttggtcccgccacaatgtatctgcgtatcgcacaacagactccccaccaacacatacaccatcagcacacaattacacacactcatacagaaccatacccacccacttgcagtgatggtctcccacagtgatccacactccccactacctttactcccccaattacattctgtcacacacaagtaaatacagggaaaatgcacagctcacacataattacatctcacacacaattacacccataaaattcaagatgatccacttcagaagcagtcacacatttcacagaaaaatagatttacaaagagaaactaatacatattctcccaaacatcaacacgattcatacataatcacaaacaatggttgattacacaattacccaaaaagagacagtcacattcacatacggttacacacacaccactacaagcccgtgcatacaatgatagtttngatttgcaacttaagcagaaacaagcatttacacgcaagaattgcaaacacaattatacacttaaataccattataaatattcactatttgctcacattgctgattgctcacattatcacaaacacaccacacacacacacacacacacacacacacacacacacgactctcacatccaaagaaatccacatc

SEQ ID NO: 482422 - DNA, 1000 bp, Homo Sapiens; identical to SEQ ID NO: 120024

SEQ ID NO: 482423 - DNA, 1000 bp, Homo Sapiens
ggctcacgcctgtaatcccagtacgttgggaggctgaggaggccagctcactaggtcaggagttcgagaccagcctgaccaacatggtgaaaccccatctctactaaaaatacaaaagttagccgggcatggtggtgcgcacctgtaatcccagctactcaggaagctgaggcaggagaatcgcttgaacccgagaggcggaggttgcagtgagccaagatcacgccactgcactccagcctgggcgacagagcgagactccgtctcaaaaacaaaaaacaaaacaaaaaaaacagcctcacccttgagcccacctgcctggcgcctagggagcccccaaccctgccggctctccacctggccctgcgtcctcccccagcttcccccaccagctgaccacccctgggcctcccgctaagagcctttctccccgcccagcctgcctgccttcccagcccagctcagaacttaacacctccggatctctcccactaaccggacctcacccccacctccgggtctcccgcctcacctgtctggcttcgggctcccaggctccagctcaggtcctggccacccccgccccgtctctcctccaggtgcgccccctatgtcctactccacccctcccggagcgcccccgccgctttccggatccccctccagctctcgtcctctctgtctccttgggatcctgcgttctctggagtcaccaccccacccggctcaaccgcggctccccggacctgcgcgcgacccggcggggctgactccgagtcgcggcctcccggtccctgccgcccgccgcgccgcggctccctccgcgccgggtcccggccccgcccgccgccgccgctgcacctgctcctgctcctcacgccacggccgtcgcctccccgccccctcccgccgcccgggcgctcgcggctggccgtcctcccgtctgtctgtccgtccgtgggtccgcggagaccgacctgggctaggcaggggtgctagg

SEQ ID NO: 482424 - DNA, 1000 bp, Homo Sapiens
acaattttatttataagaatatctgtgttatttagttgtaaagaattcagcaaaaattattaaaacgttcacgtccccaaaacggggctgcccgctttcccttcctgggtgtggcccacctccttggcgtccccaggggaggggaggctggaggaatgtttaccagaggaagtctccagccctgggaacctcggtgggggccctggagacagggagggcctgtctgggaggggggttgagcatggccatctcataggtgcccctggagttggggctggggtttggggtggcctcccccaagaactaaaacactccatcctttcccgcctacctcacccagagccacgtcttccagacaggggcagcaaagaactctcccttcccagaattagccctcaggaagctgtgggagcgggcaagcagggatggggcgagaggggagagccttggcaaagtgtcttatacagggaggggaaggctgcaccaccagctctcccagtggggtgcgttctggtgggagggtaggaggtgcagccccaagccctccctgcctgtctccctgaaggcagcatgggggtgccaaggagcaggcagggaggggatggagaaataatactgtgctcgcttgccggcttgctcgctcacatataaaatgtaattccttcatttttacatttatacatccggcggggccagggaagggctggctggggaggggctcactgaaggacttcaccggcagggggcaggaggctttctgggggcagtccgacggggcagggccctatgccaaggggtcccctatctcgtcctcagggccccggcccaggagttctcgcttctcgtccgtgctggccagggagtggcgactgccatggccccccatgtagagtgtggcatacacggggttggtgaagttggtgggctgcagggtgacagagggttcaggtagggctcaggagctgggcctgtagcccaggttaccccacccccacctccg

SEQ ID NO: 482425 - DNA, 572 bp, Homo Sapiens
ggccagatagagatgtggtgcgtatgtgcagagtacctcaagaaatgaaagtcagcatgtctcttggaagctatgaacactaatgtttaaaaaaggaaacagaaaacagaagaaatcacttaaggagagctgtcattttctattggtgaggattcctgatcttggggaggttctggaaagttcgtctctgtttcttcttcttcctcttcttggattggaataatttcaatgtcttcttcattctttggttgggaagatgtttcagttagcccaaccacttcttcttttatttcaatagtctgttcttttttttcttctgctgacaggagaactatgttctaaaacagaaaattaaacaaaccattctttacttttacaactgacacctttgtcaacaatctccacaaacatttatcaaatacctcctggtttttatgctacttatgtcatttattatatgcctttaaatgccaaaatttttttgcaggtgcttatatccttatcaagtcatttattaaaactcaagtctgaataaatcttcaagggcagcagacattgaccacggtgctgga

SEQ ID NO: 482426 - DNA, 1000 bp, Homo Sapiens; identical to SEQ ID NO: 120025

SEQ ID NO: 482427 - DNA, 1000 bp, Homo Sapiens
ttggagacaaactatgctctaccttaaaatagaagactgtctgccaatgggacgaatactaccaaagcccaatacaagcgagttaaacaaccctgtggctatttttacttttcttttaaagggactgatctgaggtctcagcttaattccactaaggagccacagtatacagaagtgctctgtaaattatcaaatgccattgctacaatgcacacaatagtcgctaataacatctctattctgcataatcttggagaactgccttaatttccccaaactcagttccctccaccttaagtggggacaatgactcatgccccccaaccaggattgtacaggtgcaaaaagggctatttacggaaaccaaattccctctataggttatggattatttatggttgctccttaagggacagagtgtaatgccattaaggaaaaggttgagttgcatcatttaattttaagctatttattttcataaacatgaggtatttcaaagtgctataagatgcagcactaaatatatacattttgaagaaattaaacacagaactttgcatttacccagttctatgcaccaaacatgaacaaatacattaacaggaagaaacaggctaggaaaaaggcatatatatatagtaaatttctttacaaaagtttcttagttcaaaaagtgataaagtaatatctactcaaaactttcacaactcattttcatacgaaaatataagtatcaaatttagttatgtatcagcgtcatactaaagtatacaggcagtgtaagaattagtacagtacataacagagattaacaatatatttgtatacaaaacatgctcctcaaacattgaggtattattacagtacttaggtatgaacttccagtctaatactggccgcaaaagccacctctcattacccaggatgtatacaaaaggcggatgtgtcaatggtatttacagaaatgttccccaggggtatcaaatggcaaaccccttat

SEQ ID NO: 482428 - DNA, 1000 bp, Homo Sapiens; identical to SEQ ID NO: 309010

SEQ ID NO: 482429 - DNA, 1000 bp, Homo Sapiens
tggcttaagggtatagccgcctcaggggagtcaccccagcagcagtcacctagtaggtccagagagtgagatgggatcaggaactggcatagacctcagtattggtcctcaagctgaggggtggaactgtagctgggcagggcccgggcctcccgaggtgcccatgtcccactgacccaaggacaagatggccagtggaggaaggtgcagattaagatgtttgttttggtaacagccgaatgatgctcgctggaaggaaagccgccctattccttcagcgcttcgactccatcgacaccacttgccctgtgtgttggcctcactttttcacccatcagtgctctacctccccttcccccatgttttagaattccttttccttaggactcctgagtcccagacagaaggtcctgggggagatggtttcctggactggggatgggtgcatgtccaccagaggggacctggtccttcccgccaggatgcctccaggctctgtctgggcctgatgctcaaggccccttgatggatccaggctctgtaaggcgggcagaggcataggccgaagctccaaggcaggcggcaggttcacagaagcccggcagccccacggggcctggcaggccaggtcgacctgcctctcctggagcccctggggaccctcgatctccatccttgccgttgattgcctggccaggccggccagggagtcctgtgaacaggagaaagtcaagacattaggggcacctcttgtctcaggcccagaattttgaaggtggggaaacttttcagatggagaaaatgaggccaaaacaccataggagaaaggactctgccccagaggcagagattctgtgattgtcccctacccccagctcccaatcagtgagctttgggagcaaacatcccttccatcacctctgtgaagtgatggtggtggatcctgggaagtcctgagaggcccagcttccagagctggaaccacccagagactccgggg

SEQ ID NO: 482430 - DNA, 1000 bp, Homo Sapiens
ttggctgcaatcttgggagacttttgttagctgataggagaaacatcataacctttaaagaaggcagtgaggataacagtgtccagaaaataaccacatatatatatataccaattttgaactgtgttagaagtatatatatatacttctaacagttcaaaattggtaaagcttcatcattaaccagaaaaaaaaaatcttacaagttcccccctttctcctgcttcaccttcttcaccagaggcaccctaaaaattaagataaaaggttacattttaaaattcttagtcccattgcccaattttaaccagtaaacattgataagcattcataagtgcccacagtgttcccagaatcatgcagaaatacaaaatgctctcagcggctttccaatctagctgtcagtggttagtcccaatcagaaaatagcggagaggaaagccagaaggtgaggctgagtttcagctagaatgaaggataaatgaccatattcaacaattttataattggcccttgaaatagggaatctacagtagaaaaaggaacccagggaaaggactgagtctaattcatataaacagtttatttgctgaggtcttgatcaagaaaaacctaagacattctaatgtggctgtggaaggctcattggatatgaataaaccaattccgtgaaccagagacagagccacgctcttcaaaggaaagacagtgtgcagtcctggagcagagccatctttagctccagcttgttaaaatagtaaacaatgctgcggaccaaactcaacaccaggtttcactcactatgaacacattgagaaaaactgttagccttcatggttttattaacccccataaaccagccattcccccttgcttgtgaaatggtgcatatcaaacattgcattttataccaattaaataataagactgacctgttcaccctttggacccggttcaccgactacaccctgtaataaataaaatataatactttttcagt

SEQ ID NO: 482431 - DNA, 1000 bp, Homo Sapiens
aactacctagtgctgcattatttactaagcacttactatgtaccacatcttactgtgccacgtgattggcctgtcagactgcctttaattctcaccacgtggtaggtaccattatcaattccattatacaagtgggaaaactaaggcttgcagagggacgtgacttgcccccctgcctgggctaggaccccaagagtcttggctaggggaggaaccagatgtccatgtcatcctgagccagaggggcaggagttcccttaccgcaacaagctctttctttagtaccagggtcatggcgtcgtcggcacactttgtctggatcaaggacatgagcagctccgggctacaagtgtccttgggaggagtggtctggatcggtgcgggtgaggtctgcagcctaccacctgtggggtagcagaggcaggccaggcggctggtcactgtgtgatatgtgtgccgcaccaggcttttttttttttttttttttttttgagacggagttttgctctgttacccgggctgggagtgcagtggcacgatcttggctcactgcaacctccatctcccaggttcaagcgattctcaggctcttctatgattagctactcccattgttcccatgtgcagatgagaaaaatgaggctcagagaggctgatgtaccttgcccaagctcacacagaggtgcttcaccaacagtgtggccactgatccaagggaggggaagggaagggagggggaggggcaggggaagggtgctcaccgcagctggaggcatgaagtgagacaatgctggccagcggtagctccacgaaggatgccacaatgctggcattgagcatccgggcctcccccaggaggccttgaggtgtgtctgggagcttgaagccacgaatgtttttctctggaaagatcttgaaggagtattctccagtggtctaatggtggggagagaggcagaacagggggccatggacacagtctgtgccacagcaggccagc

SEQ ID NO: 482432 - DNA, 1000 bp, Homo Sapiens
gatcgcctcccgagtctcgccacaggtacacgcgtggcccaaacacttcacctggcccgaaaagtcagcagacgggggaaaaaaaaaaagttgtgcgagcagccagccgggcagtcccggagcccgcggaggccgtcctcccgccgcccagccgcccagccgcccacacgcgaggccggcccggggcggcgcgcagctcgcggcacctcgctcccggctttgcgcgctcaccccggggcgcgccgaggccaccgcagggcacttacttggcacttgcttttgagtgtgcagatcgtcgcggttttcacttgggttttcaaacaagtttcagggagaaagaaggaggcaaaaaaaaaaaatccaattatgcaaatggactccggactgggaggcgcgggatggatctgacgccgctactgtacgagttctcggagcagccccgggccgggcagatttatgggggcgcgtcacggctacgccaggtcccgccgccggagcatctcgaagttaattaaagcggtaatgtccactttcctggcgaccctccgtgcgtgggtttactatttcaccatcaaacccgaccccggcgggggcgggggccctgtccccacgcctctccttccctcttctggccgcccccctctttttcctctctccgtctctcacccctttttcctctctttcgtctctttaagtcgcctgccttccactcagtgaacaatgaacaaagatgtgagtgatgggaaaagatcgccccccctcccaaccccagcagagagcaaagccggtcttaaagtaaaaatccagttgctagtatcaaactgggaaagaaaacagcgcgttcccagtctcaccaccccttccacacacacacacgcacgcacatacacacgcacgcacgcacaccccaccccaagttcacctaagccctggctggagactggggcgtcaaggtcagggcgcgcggggctgcccaactcgccggggacaccagggttgg

SEQ ID NO: 482433 - DNA, 1000 bp, Homo Sapiens
gatcacctgaggtcaggagcttgagaccagcctggccaacatgacaacacctcgtctctactaaaaatacaaaaattaggctggacatggtggctcatgcctgtaaatcccggcactttgggaggccaaggcgggcagatcacgaagtcaagagattgagaccatcctggccaacatggtgaaaccccatcgctactaaaaattcaaaaattagctgggcgtggtggtgggcaccgtagttccagcctggtgacagagcaagactccatctcaaaaaaaaaaaaagaaagaaaattagctgggtgtggtggtgggcgcctgtaatgtaatcccagctacttgggaagctgaggcacagaaatgattgaacccaggaagtggaggttgcagtgagcctagatcacgccactgcactccaacctgggcaacagagcgagactccatctcaaacaacaacaacaacaacaacaaactgggcaaaagacatgaagagagctcaccaaggaaacacacagatggcaaacaggcatgcaaaggggccccgccgcgaaggcagccatcgggggaatgcagattgaaatggcaatgagacagcgcaacacgcctcccagggtggccaggatgcacaacaccgacaactccagatgggggcggggaagcggggccctgggaacgttcattcgctgctgctaggagcacacagtgggacaggtgggcgggaggacagtttggtggcgtcttaaaaaactaaacgtcctctcaccacgtggtccagcaactgtactccttggtatttacccaaaggagatgaaaacttctgcccacattgaccaaacttggaagggtcctttaataggtgaatgagcaggcacactgtggtgcacccggaccatggagtattattcagcgctgaaaagaaatgagctctcaagccatgaaaaatggagcaaacttgaacacctattgcttggtcaaagaggccaatgggaaaaggctaccg

SEQ ID NO: 482434 - DNA, 1000 bp, Homo Sapiens
gatctctgctcactgcaagctccgcctcccgggttcatgccattctcctgcctcagcctcccgagtagctgggactacaggcacccaccaccatgcccggctaattttttgtattttttattagagacggggtttcaccgtgttagccaggacggtctcaatctcctgacctcgtgatccgcccgcctcggcctcccaaagtgttgggattacaggtgtgagccaccacacccggccttcttttgcattcttgacagtagcattctggcagattttaggtgatcagtctgagtggctttgccagtgatgcacgtgaaacctccttccaggctggggttttgctttgcttgtttgttcttgttttttgagacagggtctcactgtcgtctaggctggagtacactggtgcaatcatgacccactgcagcctcaacttcccaggctcaaggcaatcctcttgcctcagcctcttgagtagctgggactacaggcatgcaccaccacacctaactaattgtgggttttgtagagatggggtcttgccatgttccccaggctggtctcgaactcctgacctcaagtgatccacctgcctcagcctctcaaggtgctgggattacaggtgtgagccaccgcacctggccccgccaggctgttttagtggctccttgcactctcagacgtgcagagtccttaggtgggctggggtgatgccaatcaaacaagtcggcttggggatgtggggctggtgacccactcaagtggtagagctggaggccctgctgccgtttctccctttgatcctccagagatgctgtgccagccccatttagacacgaggaaggctcaggtcccctatctctcaataccctggaaacgccgtgccagccctgtttaagcatggggaagccctgggtccggggactgtgcttgcccagagccacctggctctaagggacagcccagaccagagcctttgggtccaggcacctgctggggt

SEQ ID NO: 482435 - DNA, 1000 bp, Homo Sapiens; identical to SEQ ID NO: 338403

SEQ ID NO: 482436 - DNA, 1000 bp, Homo Sapiens; identical to SEQ ID NO: 309016

SEQ ID NO: 482437 - DNA, 1000 bp, Homo Sapiens
gatccacctgcctcagcctcccaaagtgctgggattacaggcgtgagccactgggcccagccaaattgaacaattttcaaaagtcagaaaaacaatttgaccttaaagcatttagcaaatctgatatttgacgttaatttagaccaaatgtctacatttttaaagacattttattttactaataatttttagaactgtcattatttccaaaagattactaaagtcacatgaacaaaaaggcattaaagttcctgtttttctgacaaaatatttaagtgcctatttttctaagccagttaattagagctcttttatctataaacatgcaacatatataaatccacagacagaagattcagcacttgtaagatttttcatttgccattttctcccttccatccttccttctttccttccttccttccttccttccttccttccttccttccttctttttttgagatggagtctcacgctattgcccaggctgtggtgcaatggggcaatctcatcacactgcaacctccgcctcccaggttcaagtgattctcctgcctcagcctcctgagtagctgggattacagacacccaccaccatgcccggctaaattttgtatttttagtagagacaggtttaagcatattggccagtctgatctcgaactcctgacctcgtgatcaacctgcctgggcctcccaaagtactaggattacaggtgtgaaccacctttcttaactggattactggcttcagggtggagcccttggaggaacagggccaggaaagcatgcatttctagggccaaataagcagctgaaggcaaagacagatcccccaaattaagagtgtcattttataccggttcctggatccccaaaaggagggaaatatttcgggagaagacaatgcagtgcttctctcctgcatttcattgcaaggcaacccaaagccaatcagcctattttgtaattagactatcccttatgggagtctcgtccc

SEQ ID NO: 482438 - DNA, 1000 bp, Homo Sapiens; identical to SEQ ID NO: 309017

SEQ ID NO: 482439 - DNA, 1000 bp, Homo Sapiens; identical to SEQ ID NO: 309018

SEQ ID NO: 482440 - DNA, 1000 bp, Homo Sapiens; identical to SEQ ID NO: 309019

SEQ ID NO: 482441 - DNA, 1000 bp, Homo Sapiens
gatcccatgctgggtcttgtctctcgagccccttcgtctgtctgggacagtttcctgctttgttttctgtgctccgggcaccgagcagcatcccagcccgttattcgtggaaggctactcgttccgtgtcgctgggtgctagttctggtcacctgtccaccccccacctccctgggagaacgtcaccctagaaacagtgcgagagtcacccatgggagctcacctggtcccatcctcccccttcctccctgacacaggcagtacgtccgagacacagtcgtgggcaccatgggcctgaaggccacgggccggctctgcaccgtggctaaggcaagggggctgcgagcctgcaggtgagccacccccacccatgccctgggctccaggggaggctgcgaggcccctgaggactctcctcagcttcctcattgcaggggagagctgagggacaccatcctagactgggaggactccctgcccgaccgggacctggcactcgccgatgaggccagcaggtctgaccccccacccccagggagcccatggtggggcggggcgggacgacagcagaaacacagccagctccagcatgggacagtggctgaggctcacaggcagtgaggggaggcttcctggagcaggtgggccaggccaggggctgcacacacgcactcacacacactcgtcacctcatggctctgggtgggtgctacacaaggaaaccaaggcttccgccaggtgtctcctctatccagtgctgcccagccgggaggtgaccgagccagggtcccaccctaggtgtccaagctcttaccacactgtgatactccccggaagtgtctaagggcccgcccagatcaatgaccccgccaacggaccgcagaggagggcagggcgggatcccaaaggctgactcgggagtggggctggccttgaccgccccggtgagcacagatggcctaggtgtgaaccggcccccagggctggctcgggatgttgg

SEQ ID NO: 482442 - DNA, 1000 bp, Homo Sapiens
gatctggtgtcccctctccccctgggccgatggaggtggggtgggggcacctgggcacccgtccctggagagacaggaggagccgataagcaaacacgtcaatcactcgatccctggaattgggttaataaagctgccagatggagagatggcttcggaaatccatgcgtccggccatgtccaacggggacagcgtgcctggacacagctgccgcccatcaacacagggccggggaggacgcgggggacctgttgacagggcctcagcttctccatctgtccagggggcttccacgctgcacccccgagggcctcccgtgtgcagccctggccgatgtttgatgttctcacggcgcacctaggaccactgggttctcttctttaatcccaggctctggggagggacccctgctcaaggcggacaggcctctgccattatggagctcccgggaggccaacatttatgaaataaatgcatgagtggaaccagcggctcctccgttcaagacgaggcccctcgggctgataccggggtcagacccgggctggcgggtccaggagggctcctgaggaagtggctgtggacgggaggcctgagatgagctggggtcagtggtggggttggacccgtttccccgcagtgagaacagcaggagagggtcagggggctgggcacggggtcggggtggtcgcaggtgcagacactggtgtgcaccggcacacacaccctcacacccgcacatgcccacacactgccaggtacacgaacaggtatacacacgcacgtacacacccgtgtaccttctgccactcacacacactgacatgctcatagatgtgcaccgatacacacacaccctcacaccggtgcatgcgtgcaaaaacagcacacacactcacatacaaatgcacaggcacgctgtcctaggtacctactcacacaggcgcactgccaccctcaaatggccgcacatctgcacacaggaacacacacgtaggt

SEQ ID NO: 482443 - DNA, 1000 bp, Homo Sapiens; identical to SEQ ID NO: 309020

SEQ ID NO: 482444 - DNA, 1000 bp, Homo Sapiens
gatccaggattagaggagaagccaggcattccatgggcagcccctgacccgcacctgggccacttgcctggctcacctattgctcaccaacaccttgaagaagaattcaggggcaaagatgccttggggaacattgtcatagcatggggcattctccagacagagccacctgcaagccaaagatcaggcagttgtgctaccaaccatgcctagtctgtgccaactcccaatttcttcctccacccaatgttttcggtgaggaccaaatgggtgcaatctcatgccttccctcattcattccttcattcactcattcattcatgctgactgaacgcctactgtgccacaggttgtctactcattcatttcctcctgccttcacacctccatctgtcaattcctctgtcactgtgcatccatccagattacaggctgtgtatctatcatatgccaaatccttattcattctttgctgcttgcattcctttatcccataaatatagcttgagcacttactaggtacaaagtcacatctttcatttattcccttctttattcattatccaataaatgcaggttaggccaggcatagtggttcacacctataataccagcactttgggaggccgaggcaggtggatcacttgaggtcaggagttcaagaccagactgaccaatatggtgaaaccccgtctctacaaaaaatacaaaaattagcggggcatggtggcatgcacctgtaatcccagctacacaggaggctgagttgggagaattacttgaacccaagaggcagaggttgcagtgagctgagattgtactactgcactccagcctgggtgacggagcaagactctgtctcaaaaaaataaataaaaataaaaaataaagcaggttaaattctgactaggtgcaagttgttcgttcattcactgccttcatttgctcatggcttcatttttttcctttcattgaatgaaacttactgagcccctatata

SEQ ID NO: 482445 - DNA, 1000 bp, Homo Sapiens
gatctgtaaagctgtgggtcgcgtgacctacatgtccggggagcatgctccaggctctggggtgggggctggagaaagtgacgtgcagggctctgagcctctctctgcaagactccgtgactctctgcttcctccaaggagacccaccctggttcctccctcgcctccccggagccctggctgggcactgccccgaccacgaggtggagatcacaggggccaaggcctagagctgggaagctgcagggagttctggggctctgagggctgggctcttggcggtggtctgcagagagaagggggtcccgggagaaagtaaggaagagtgacggctcaggaagcctctgcattccttctgctgtgtcctagaaaaggggagacccggtttagggtcccctgccacaacatccaacccaccacattgaaagtgtacccaggggccggccatggtggctcacacctgtaatcctcgcattttgggaggcaggaggatcctttgagcccaggagttccagaccagcctgggcaacatagggagatcctgtctctatttaaaaaaaaaaaaaggggggtacccagggggttgccaatgcaccctgaagtctgagaaccagtgcttaaagtgcacaaaagggcatggcagatgctgctatgtccccttggccacctgggagctggcttccgacaatttcctacagtccaacggcttcccgtgtccctttgcctggggtctttctctaacagtgtgcaaacctactgcgtgcagcccctctccttcatgcaaacacctgctgtgtgcagcgtctttattgcacgcaaggcctactgtgtgcagagccccacctgcgtgccatgcctactgtgtgcagacacccagagacatgcagcacctactgtgtgcaggcacccacctgcgtacagacactcaccgagaaccccctctgggtaggcaggaagtaccagggagtcaacaccccagaacacccctcaaacgggggat

SEQ ID NO: 482446 - DNA, 1000 bp, Homo Sapiens; identical to SEQ ID NO: 309021

SEQ ID NO: 482447 - DNA, 1000 bp, Homo Sapiens
gaattctcccagcaacccgggaaggcggctgggcccgtcggggaggcttctgggtttgaaaacaggctttgcccaagttcccacagctaaagctctgtcacaggcagcctgggtgcccggagtgtttgccactgagacctgggcctgcccgtggggggcacggtaccgagtttgggcagtggcggcaccaccggggagtggcctctggaggcgggaggctggagcaagagactgaccctgtccgttgggcctgcaggatgtcagtgggcccctgagggagctgcgccctcggctctgccacctgcgaaagggacctcagggctatgggttcaacctgcatagtgacaagtcccggcccggccagtacatccgctctgtggacccgggctcacctgccgcccgctctggcctccgcgcccaggaccggctcattgaggtaccggcccaccagggctgcggggtgccgagtgccccgcacctgtccacactggggccctgggtccttgcagggaggagggagacgctgggaacctgagctggtgcgcctcctgctgcctcggtgggcggtggctgtgatgaatatttgatgccacacctggccacgcggcgttgggggctgtctgggcccatggcggggctgatacatgctggtggcggcaggtgaacgggcagaatgtggagggactgcgccatgctgaggtggtggccagcatcaaggcacgggaggacgaggcccggctgctggtcgtggaccccgagacagatgaacacttcaagcggcttcgggtcacacccaccgaggagcacgtggaaggtgggccacggcccagggcacagggtgggtgcggtgtggtggctgagcagccactgacacgctgtccccacaggtcctctgccgtcacccgtcaccaatggaaccagccctgcccaggtaagagggtggggtgcccatgagacacagggtgcctctgggggtacccaggcccgacagaggccccct

SEQ ID NO: 482448 - DNA, 979 bp, Homo Sapiens
  misc_feature (599)..(601): n is a, c, g, or t
gggactgtctgagatgatcaagccctttgcgtgagggcgacggggtacggagccttttcgctcagagcgcaaacgtgcgtggtgcctcagtgtagctctcctcagacacacacggcatttttcctataccacaacgttccctcccattctaacatcggaatccaaactgcgccttcacgcacgggcatctccattccctggcagcgattgtctttggttttggtgagaaaggaaataatggaacttagaggatgaagtctttgagccaatgtgatctgtgtgtgtctgtgtgtgtgtctggatcagtgtgtgtctgtgtgtgtgtgtgtctgtgtgtgtccgtgtgatctgtgtgtgtgtctgtgtgtgtccgtgtgatctgtttgtgtgtctctgtgtgtgtgtctgtgtctatgtgtatgtctgtgtgtgtcatgtgatgtgtcttgtgtgtgtgtctgtgtgtgcatgtgtatgtctgtgtgcatgtgtgtgtgcatgtggtctgtgcgtggtgtctctgtgtgtctgtgtctgtgtctgtgtgtgcagtgtgtgtgtctgtgtgtctgtgtgtctacgtgtgtgtgtgtgtagannnggggggggtgtgcactttatttcctcacgtgcccccgctgcctccagcaagagccccgcccatgccactcaccgcggagcagctccagcaggctgcccttggccatgagctccgtgatgatgtacacggggtcccccacggacaccacggcgtacagcgccaggatgtgtttgtgccgcagcttcttcatggcctggatctccgactgcagcatctgctggtgcaggaggttgtctgcggggacgggtggcctcggtggatgcagcccctgaccccccaggcctctcaaggaagaggccaaggcctgcccccacacacagcagccatcacacccagcagctgtgcaggacacacagacctcctgcccccgacagcacc

SEQ ID NO: 482449 - DNA, 1000 bp, Homo Sapiens
catgccagaaatgacactgtcacaatcacattgtccctagaccaccaacaccattgcacaatcactgtcctaggagcagaaacagtcactttatcccaatcactgcatcccatgaggccacagtcaccctgtgacagtcacagcattcttggagcacacacagtcactgtcgcaaaccctgtcccagaaacacacagtcacactaccctggaaatacacagtcacactgtcacaattacactgtccctggaggacacagagtcatcgtgtcaccatcacaagaccccagaagctcacacagagcacacaactgaggtagccacagctggtcatacccggacagctggagcaaacggaggtcaatcggagaataccctcagaggagaccaagctcaacacacatgcaccctcactatgctgtcacctctgcagtcagggattcttccttctgtgctgggactgcgccccccctccactgtttcctgcctctgaacagctacttaacgctaacactcttgccctgagaggggaactccaatctaacgcaaggctcccaaaacagtgctcccccaagaggcaccctctggatttctgaccccagctgctgcaggaggagtccactaacatccccgcaatagagtcctccatcccctagaaggaccctgagagcaccccaccctgaagtaaagatcctggtcctagcaggcacccccttatggagtgctccaagagtaccccaaacactgcgaatctagccctcagtatagtgcccccaggaaggtccctccaagtggttcccagcttagcagctgttctgcactgtcaccaagaatacagacccctaagtgtgcagcccccttccccaacccagacttcgttaacaccacgcgcagcgtggcgccccctaaatggaccccaggatgggcttcagcaggaagcctcccgtagagcgcacaaccaggggccaggtcccagacgcccccgcagccgaattccctcc

SEQ ID NO: 482450 - DNA, 1000 bp, Homo Sapiens
gcatgcctgtgatcccagctactcggcaggctgagacaggagaatcgcttgaacccgggaggcgggagcgggaggcgggaggcggaggttgtggtgagccaagatggcgccattgcattccagcctgggcaacaagagcaagactccgtctcaaaaacaaacaaacgaaaaaaaagaaagaaggacacaggaagatgggccacttgggagaaagaggctgaggaaggggcagttagctacccagacctaaaggtgtggctgggggagtgtcctccctccttagatgatggggcgtgggggcacctggatgcggtcggagtagttatctagcaggaggacccctgagctggtcactttcttggtctccaccatggtcttcaggtcagccaggagggtcatgtgcttggacatgtccgtggccagcacctgcgggcaagggggcgtcactggggccgctgacacccgccccccagactgacccgggcctctgaagttttcaccaggtagaagccgcccgctctgtccaggttgagggttcctctgggactcagacccactcctccccaaagccctcgactcctaggcttcctttcccgctccgtcccgccccagccccgcccaccatgtcgatgaccatcttgcgtaggctctgccgctggcgcttgctgaggttctggaagatgtcgcagttgtcctcctgcagcagcttgaagcccacggccaggtggtgattctcgagcaccgactcatcgttgtacatgagcgccagctccgaatctgcagcccagcccggagtcaggggagggccccacgtgtgcagctccaaccgcagagggccagctccgcccccaactagctaacccctccccagcccggccagcctcgcctccagcccagtcagctctaccccagcccggccatcccctttccagcccagccagccccgcccccagccccgcctcctgcccgttcatcccctttccagcccagccagccccgc

SEQ ID NO: 482451 - DNA, 1000 bp, Homo Sapiens
aagcttgaatttcacaatgataacatagctgatttgactagatgtaatgtgatgtaagaggaaaagagaagagtctagaataaatcctagtttccttaattaattagatgaataatttaccaagaccaaatagagttggaagaggagtaactttgtagttacaggagggaagaggcagaggtaggagaaacccgaggagagagtgggaggttcccggaaagattgatagagtgttcccaaaagaattgtaggatcaatggtgttaaactgccaaggggtcacaggagatgcaggactgataatcgattcctgaaatgagtggaatgcaggcagtagatgaccttgacagacttggagtggaaagaacaaaagcatctttaatgtgtgtttaaaaagaaaatggaagggaggggatggggaaataatcacatacatatgtttcaagaacttttgcaataaaaatggcagacaaataatagggtaggaaagaaacactaagagtcttagcaaaatctctgtaaaaatgggtgatgtttcagcaggcttttgctgattgaggtaatcccatagagcatagatgtaagaatcaggagacaaaagggtcacatacagaagcaaaatccttgactgggtaatgtggttcagaatcaagaggaaagataagagataggggtagggagccttcaactatgataataggagagaagtcagagaactgggattgaactgaatgtgggttgctcaacttggtgatggttacagtgagatccttctattctgaaatttctgaaattcatagtgaattatctgaggctatcggtgggcacaggggcagttttctaatattgaaccttccttgcttgagaagcagacatgccaatctctgcaaggtttttggtacatatgttatctgaatagtctccatattctaaggtagttgttttgattcttctcattgtagatgaggaaattgaagctctgagagaccaagtagcttttt

SEQ ID NO: 482452 - DNA, 1000 bp, Homo Sapiens
gatcagcatctactggtgacaaaccaagcaataggctcgtatggtttattcagcttaaaagaaaaataaaacaaaacaaagcaaaacaaagtaattgttgatattttctttaggcgttactaggatattacaacaggattttttgtttctggttttatttttcctaaaagttaattgtcagcattaacacatttttttaacattctctaaagagtacatacataaccagaaaaatcagcagatttgaaacaatagaaaaatgtacaattttttcaatgattgatggatttagttggattattggcattaattttctttttctttttttatgtcatatgaagtatttattaggcagttatacatattgttatgataggaggagtaatgtacattgagtattattggcattaattttctactcatatgtattcagtctttcacatatataaatatacatgcctactatattttttatatttctattattatgatatattattttaactctctgtaaggacaagtatcactttgactgcaacagaactttcacctctttgttgggctttagctaatattcctaggacagtcacaaatatagctccagagagttacgggtaactccaagagataaattgttgtgtctgcagcccaagctaggaaacaggttgcccatggtgagatttattgacttcaactttcgttttttaaagtaactaaattaaactaacattgactctgagtgtcctgagacatttaaaacaatgtatacgtttaggaaaggattattgttgtgacaatcgtagtaaatgtgatggttttggaactgaatagtttcattgctctggggctatctttgataactcaagtaaagagaataatatttgctgaaaagttatagataggaatttagtgtctatgagagttgagggagaggtaggagccgattaatagcattagtttgagtggcatagccaggatatttgaaacatcctcctcagag

SEQ ID NO: 482453 - DNA, 1000 bp, Homo Sapiens
tttctcaatttatacaccaactttccccatgacagaaaagtttaatctctgctctcaaggatatcatttggccttctccccgaacactgtattccagttcctgctgggcagggtaatctgaacaggaaaactctctaccttcctgatcgggacatcgatcttccaggaaagtgaaaagggggaagaggaacaaaatttaactaaaatggtcacttttaatgggaaccagaggtatagttacaattacatagtccgacacaaaaaaaacccttgggtgatcaggaattggaaggttacaaaataacgagggtaacactgggtacaggacaaaaagctgttccagaacctggggagccaggctaattaatacggcctctccctgcgatcctgtctgtgctcacccctgcaaaaaaaaaaaaaaaaattaagtatccattatatttgagttaccagcctctccaagcctagatatcctatctgcccctcctacctaacccagcgagtatcttatctcaagtgggtctacagattcactccccctgagttaattttccttccctctccactactggttacaacctcaggtctttccacctagccctcaaaatgaaaccactttctcaacaaaaccctgttatcctatggcctctgttcaactgctctacttttttattctgatttaaagtcttacctggaatccatcttgccagggccaaagccacctctgtccccaccaccccggccccctcggaagcctccacggtccccgccgcggccccggtagccgcctcgatcatagcctcctctrccaccacgacgatcatccccgtagttaccccctaggacaaaagaaacaagatctatcatattcccattcccctatgttccccgagcctccccgctgaaaaattaaggattctttggtcccagctccctagcaccaggtctgcctttcttacccatgtgagagccacctggtccccctcctgggccatctggt

SEQ ID NO: 482454 - DNA, 1000 bp, Homo Sapiens
acatgatttagaaattaggattttacagagtccaggaaaggaaaaggaagaaatttaaagaaattcttcatttttataaaagcatgagagagcactgaaaacctgcccttaagatgtttttaggtacatattttaggatttttattgctgattacagatttgaaactatgaaatgtgcactgcttggcaagtaacacaagtaattctttacttattcacatttccaataaaagcgtaaataaacagacaaaaaatataaaggacaagagaaatacaaatagcaacagcttcaaaacaaaaggatttagtaacagaaagtctccacagtgtccgtcaaaatttaagattatccaaaccgtgcaaacgctcaacacaaaccaacgccatacactgaactattaatacttgtcccttgaagttgcaaactagaagccacccacataactgtatgatcacacaaaccaactaatttgctcaaggttcaggttaaagcaacatttaatatcctttacaagatggaattcgtgacaagttcaaaaggagaacttcctttgttttaatgcagctgtgctcagaagcctgtgatttcctaggaaaccatctgggtttagcccattagaaaaatgcagtttaaagcagtgtcacactggctgcctgaaggtacccttggagatactggagcgcttctgcattcaggctggtgctcaccattgatggaacctacaagagatgggaaacacacactggctgttggagatcttggtgcgccaatacaaaccccatcttctacgggagagctgccacagctctgggaagagcagccagtcaagtcattaatcaccatccaaaaattctccagaaactcaactgcttttatgccttcaaaaataggtctaaagaagagatccataaggaattactattattaggtgtgatagtggtattgtggttaattaaaaagtccttactggttaatgatgtagaataaggtacttacgcg

SEQ ID NO: 482455 - DNA, 1000 bp, Homo Sapiens
gagctccaggatcaccacagctgcccaatcatccagaaagaggtgtggagagggaaacaatcatgacgcggaccgcacgaggtttctccctgatggacggggaagtcttctttgtggaagacactgagccacactaagaagccgccagctcagagacggggcagacacagcaagagggaggtcagagcagaggccagagcccaggcaggatacgggggggccatgcaccaccaccggcatccgggaggagtgtcaaacgggtgactcggccgggaagcagcctttgagagacagacatgcttgccccatccccttgccggcttccttctccgtccctgcgtcgactgtggctacatttctcgatgagggcagagggcgacaggcgtgacaaccaccttcttgaagctctgcgggcaccctcctgcgggtggacgatgagcgcctgggaggccgttgtccttggttggggagcgctcgtctggatccagcctagcaaagaggctgctccggatggggaggggatgaaaacccctgcggtccgacgccgatgcccacgttgcccaggccttcacagacccccaaactggaaccgccgggacgacgactgccaaccggccacacgacccaggcagagacgcggggagaggctgaccagaagaaaggccgacgtgcaagaaacccaccctccggcgcacagggcacatgtgtcccgaggcgcacgacacacagacggacagagacagaaagagagggccacggaaagagcgagaagggagagagggagagggagagggagagagagagagagagagagacgtgagagagagacagaagtcggcacacagacaggcactgcgcgcgcacacacacagacacacacacagacgtaccctccccaacacacacacacacacccccatgacgaacacacacgtacagcagggaacaccctcccgcagcagcccctgaagctgcgggttctgctctccgcgactgagag

SEQ ID NO: 482456 - DNA, 1000 bp, Homo Sapiens; identical to SEQ ID NO: 309025

SEQ ID NO: 482457 - DNA, 1000 bp, Homo Sapiens
caaatctgcttccccatgaaagaacagagaatagtttaaattagaatcttagctttgggtgctaatggtggagttaaagactttttctctgatttgtccttggaaaaaggttttcatctccggtttacaagactggtgtattagtttatactacaaggacaggcccatttgagtattttgttttcaattagggagatagttggtattaggattaggattgttgtgaagtatagtacggatgctacttgtccaatgatggtaaaagggtagcttactggttgtcctccgattcaggttagaatgaggaggtctgcggctaggagtcagtaaagtgattggcttagtgggcgaaatattatgctttgttgtttggatatatggaggatggggattattgctaggatgaggatggatagtaatagggcaaggacgcctcctagtttgttagggacggatcggagaattgtgtaggcgaataggaaatatcattcgggcttgatgtggggaggggtgtttaaggggttggctagggtataattgtctgggtcgcctaggaggtctggtgagaatagtgttaatgtcattaaggagagaaggaagagaagtaagccgagggcgtctttgattgtgtagtaagggtggaaggtgattttatcggaatgggaggtgattcctagggggttgtttgatcccgtttcgtgcaagaataggaggtggagtgctgctagggctgcaataatgaagggtaagatgaagtgaaaggtaaagaatcgtgtgagggtgggactgtctactgagtagcctcctcagattcattgaactaggtctgtcccaatgtatgggatggcggatagtaagtttgtaattactgtggcccctcagaatgatatttggcctcacgggaggacatagcctatgaaggctgttgctatagttgcaagcaggaggataatgccgatgtttcaggtttctgagtagagaaatgatccgtaatataggc

SEQ ID NO: 482458 - DNA, 116 bp, Homo Sapiens
tagccttgtcggagcaaggctcaaaaaattagcttaagactcagagttattcctctccacggaaatctttgatgaaaggcgaaagatttatacgatctgaagagaaaccagagtat

SEQ ID NO: 482459 - DNA, 1000 bp, Homo Sapiens; identical to SEQ ID NO: 309026

SEQ ID NO: 482460 - DNA, 916 bp, Homo Sapiens
  misc_feature (46)..(46): n is a, c, g, or t
  misc_feature (72)..(72): n is a, c, g, or t
  misc_feature (274)..(274): n is a, c, g, or t
  misc_feature (541)..(541): n is a, c, g, or t
  misc_feature (557)..(557): n is a, c, g, or t
  misc_feature (573)..(573): n is a, c, g, or t
  misc_feature (582)..(582): n is a, c, g, or t
  misc_feature (584)..(584): n is a, c, g, or t
  misc_feature (589)..(590): n is a, c, g, or t
  misc_feature (598)..(599): n is a, c, g, or t
  misc_feature (602)..(603): n is a, c, g, or t
  misc_feature (607)..(608): n is a, c, g, or t
  misc_feature (653)..(654): n is a, c, g, or t
  misc_feature (694)..(694): n is a, c, g, or t
  misc_feature (745)..(746): n is a, c, g, or t
  misc_feature (770)..(770): n is a, c, g, or t
  misc_feature (781)..(781): n is a, c, g, or t
  misc_feature (784)..(784): n is a, c, g, or t
  misc_feature (795)..(795): n is a, c, g, or t
  misc_feature (797)..(798): n is a, c, g, or t
  misc_feature (852)..(852): n is a, c, g, or t
  misc_feature (859)..(860): n is a, c, g, or t
  misc_feature (867)..(867): n is a, c, g, or t
  misc_feature (872)..(872): n is a, c, g, or t
  misc_feature (905)..(906): n is a, c, g, or t
  misc_feature (911)..(911): n is a, c, g, or t
  misc_feature (914)..(914): n is a, c, g, or t
gtatatataagatgacacaggataaatattatatactatgacatanaaaatatatgaggttatatgttacanataaggcatagcacataacatgtaatatatatcatatataatttttttttagacagaatctcrttgtcctgttgcacrgggtggggtacrrtggcgccrtctttgctcactgcaacttctgcctcacagggtccaagcaattgtcctccctcagcctcccaggtagctgggactacaccacactggractrcaccagctgcnrccatgcctarctaattttttggatttttagtagtgacagcgtttcactgtattggccaggatggtcttgatctcttcaccttgtgatccccttgccttggcctccaaatttgctgggattacaggcctgagccaagatccatattttttaaatgaaaaaaaatttcaaaggtactctgcttggtacaataatcaaatgtataaactgaggaataaaacataaccgatgaaacctacttataactgcatatggaaaatacagacggntaattttttgaaatancatattttgaaagccntaactagtnantttgnngatgttgnncanntgannggccagtatgaatataccttcaaagcagcaacacaggttccccanngagaaaaagcaaacacagggaaaataaaaacacaaaggtncaatctcttctgacctttgaaagacacagcacagacagtggtccttagganngaagagcaggagacccctaatccngtcaccatggnganagggcataaananngctgggtgagggcacaatccacatcgcgaggtccaactgctgccaggrrgacangagtgcnnttacacnagacngaaaggtcaccgaaggctcagagagttgtgtcnngagcngantc

SEQ ID NO: 482461 - DNA, 1000 bp, Homo Sapiens
gttttaagccagtaaatcttaaggtagtttatttcacagggtgattgtgggaatacataatcaaaaaaatcagaatattataaacaaatttatgccaataaatagaaaaaaataaataaaattcttagaaaaacagattttcaaaactgatagaagaaataaaaaatctaattagaattgaatttaaaaacctattagaattgaatctaattaaaataattatctggataaaactccatatccagaagaaactctgtactcaaacctttaaacaaataataaattataccagtcctaaatagccacttttataaactgagaatatgccacattctttttatgagtccagcataaccttgataccaacatcctaaaaaataattatttcatcactaagtacaatgataaacaaaatattatcaagaaaaattatcaattaataaaatacaatgtataaattttaaaaatgaatttatttcaggacttcaggggtggcttaaaatttttagatcaattaatacaattttctaaattaacaaaaaagagaattataataatcatctcaaatcccatttgtaatattaaataacagaaaactagaaataaaatagagttttcttagtctgaaacaaggcatttattttaaaaatggaaagaattatcagatttaatgatgaaataatgaaagatgtatgacttctgtaatgagataaggatatctcctatgacccattaataattatctggcaaagcctagccagtacaataagccaaataattatattgcagaaataaaaatcaacttatgtgcagacatgattttttttcatagaaaattcaaaaaaatatatacctcaaattattgggattagttaattgagatgatcactggactggacatgaagctagtataaaaataaattgtagttacatatactagcaacaaacggaaagtaaattttttgtttgtttgtttttaatgataccatttataatggca

SEQ ID NO: 482462 - DNA, 1000 bp, Homo Sapiens
ttcacctcctgctgacagtgggttcctcagggactcagagcaggcaggcgggggctaccttgaggctgagctaagctatccccgtggatgggactgtgagtcctgtcgaatgtcttggggagccgaaggcagtgctgcctcctccatgttaaaggcaatgggtgggttgggggtgttcctgaaggctcacgcaggtcccatgaatgccctgtgtgtgtccctataggatacctggtcctatcaacaggctgaacccgttcctgttcctgggaggacctggggacccctcctcaagctacacagcacccagaggaagcatggcaggagtgggctcaagttttatttggaatcatttaaaaaaaaaattcacagcagcataagtggggtcagaaggaccagagggtgggtggggccgagggagggcagtgaggttggtgcagcagcacaggtggacaggccaagggtggccagggagacgagggcaggagcgtgggcagccgcatgtcactcaaggcgggcactccttgtgctaggaggggatggtgtccaaggcagaggagcgctcttcaggtcatccacgctggcctgtagccctctagtctcccccactctgggcctgggagagagaatgacctgcacacccagctccaggccccagccttaatgggccaccctgagtgggctgagaaaagttgtcttctgtgccccatgcctgaggggtcatccgtggggggacctcccactcaggttcagggttagccctgtacacagtccctgtaggggctgtggaaggtcaggaggcccctctgggccctgggagcccaggagggaagcagtgcgtctgtgggggatggggtccctaccaaggaaccccccatggtgcaccccaggagcccagctcctacctcctctgccacttcctctttctctttggatgccacaccctcctgttggggggcagatggcctcaagtcctcctgtaggggacaaaagggggcat

SEQ ID NO: 482463 - DNA, 1000 bp, Homo Sapiens; identical to SEQ ID NO: 309030

SEQ ID NO: 482464 - DNA, 1000 bp, Homo Sapiens
gctcattggcgaaagagcagccgccagttatggctcactccctgggagaaaagagagaaaaagtaaggtcagagacttgggtgatgagtggccacttagtagcatgatgttcatcagactggagttgtatgctgttgggggtgatcaacactgctggttacctactcaatagccatgtacccttttccttattcatgcattcatttgctcacttaacaactatttattgaatttctgtcactcttctaggtgttgagaatatagctgtgaacaaaatagacaaaaatgtttgcccctatggaatgtgcattctagtgagagagttgggcagaagcaagacaaatgtgtttgtagaaatctaattccgcacatgttctgggaaggtgggctgcatcctcatgtgtctaagcagaatatagcaatccagttcctctttacagtggcagatagaggagtgaccatgagataccaccatggccaaggaataggatgaggatgtcaaacagcagaggcggagtttttaggaacgttcttcctctctgacaaatgatcaaaacaacaaaaattgttgttgctcacttgcctctttctccctgacaggatgtgaggaagtgatgtttgaggccatgagagtcatcttgggaccatcgggaaggccaagaaaatgccagcctagggccttgctgtcactaagctgctgagccaactctggaatcttcttctcccagacttattattatgggaaataattaaatgggctttgttttgcttggctttgcttttttttttttttttttttttggcttacatcactgttgtggcagttcttacttgcagctgagaccatccctaaatgatatggaggaggttataaggggacacaccagaggcacataaaagcatgaaataaatctagcatatctttttagaggaaaattctcaagtgagaaggggattatgttattggaaaagcatattcgttattttacttttctatttg

SEQ ID NO: 482465 - DNA, 649 bp, Homo Sapiens
  misc_feature (182)..(182): n is a, c, g, or t
ttggaaacaacaggatgaaatttaataaggcagaaatgtaaagtcctgtcagtgggttcaaaaaaaaccctccgacttcacaggcacaggatgaggacgcgtcatttgaacagagagcgagaaagtgaccctcgcatggagccgaccgtcagtcctgtgtgccagcggtggcccgtccctgncagagaggaacgcgggctctccctcccatcgcgtccaccgaggagaaggctgatgctgtgatggtgcctaatgcagcataatggctgggtgctttccgtgcattttcattccggctctaaattcaccctttgagctagggcagaggagctgcttgcctcaccagcggaaaccaggcctgagaggttaagttacttaggctgctagaatgtggcagcagcagccggaactcagagcctgtgctgttcggagtgaagccgagggtccatagatggtgccgattctgggtgaagaaatgctgaaggaaatgagggcatttagcttgaaggcagtttttttttgtttgtttgtttgggttgttttttgtcttttttggggccacacccgcggcatatggaggttcccaggctagggggctcatcagagctgtagccactggcccacaccagagccacacaatgcaggatcc

SEQ ID NO: 482466 - DNA, 367 bp, Homo Sapiens
cggtcgaaaggggatcaatggcctttccctgagtgccaagggaacacaaagaagacctgggaacctggacggggcttgtgcctcagccaagccacatgttgaaatgcctgccagaggaccacagaggtttctgcaacagtcaccccacccccaaccctccaccacccagctagccctgacgcaacctcccctgcacgcagccccagccccagtcccagcgcagtccctttgtttcctgacattcgttacagccaaaagatccagggagtctgtccacctgtgagcggaggagaggatgtccctcaagagtgagacaggaagcgcaggggaaatgcacttgtcctagaagacaaggccagtctcgccg

SEQ ID NO: 482467 - DNA, 1000 bp, Homo Sapiens; identical to SEQ ID NO: 120027

SEQ ID NO: 482468 - DNA, 1000 bp, Homo Sapiens; identical to SEQ ID NO: 309033

SEQ ID NO: 482469 - DNA, 1000 bp, Homo Sapiens
gatctagaactagaaataccatttgacccagccatcccattactgggtatatacccaaaggattataaaacacactgctataaagacacatgcacatgtatgtttattgaggcactattcacaatagcaaagacttggaaccaacccaaatgtccaacaatgatagactgaattaagaaaatgtggctcatatacaccatggaatactatgcagccataaaaaatgatgagttcaggtcctttgtagggacatggatgaagctggaaaccatcattctgagcaaactatggcaaggacagaaaaccaaacaccacatgttctcactcataggtgggaattgaacaatgggaacacatggacacaggaaggggaacatcacacactggggcctgttgtggggtggggggaggggggagggatagcattaggaaatatacctaatgttaaatgatgagctaatgggtgcagcacacaaacatggcacatgtatacatatgtaactaacctgcacgttgtgcacatgtaccctaaaacttaaagtataataaaaacaaatgaccagatgtcaaatttatcacaaaaagacttcaaggctttggttccaaggtggctgaacaggaagagctccagtctgcagctcccagcatgagtgacacagaagatgggtgatttctgcatttccaactgaggtactgggttcatctcactggggctcgtcagacagtgggtgcagcccacggagcagggcagggcattgcctcacctgggaagtgcaaggagtcaggtaattccctttcctagcaaagggaagccatgacagacagtatctggaaaattgggcactcccaccctaatactgcacttttccaatggccttagcaaacagcacaccaggagattatatcccattcctgggagcctcactcactgctagcacagcagtctgagatcaaactgcaaggcagcagcgaggctaggggagggacgtccactattgct

SEQ ID NO: 482470 - DNA, 1000 bp, Homo Sapiens
gatcccttccttacaccttacacaaaagttaattcaagatggattaaagacttaaatgttagacctaaaaccataaaaaccctagaagaaaacctaggcaataccattcaggacataggcatgggcaaggacttcatgactaaaacaccaaaagcaatggcaacaaaagccaaaattgacaaatgggatctaattaaactaaagagcttctgcacagcaaaagaaactaccatcagagtgaacaggcaacctacagaataggagaaaatttttgcaatctacccatctggcaaagggctaatatccagaatctacaaagaacttaaacaaatttacaagaaaaaaacaaacgaccccatcaaaaagtgggcaaaggatataaacagacatttctcaaaagaagacgtttatgcagccaacagacacatgaaaaaatgctcatcatcactggtcatctgagaaatgcaactcaaaaccacgagataccatctcatgccagttagaatggtgatcattaaaaattcaggaaacaacagatgctggagaggatgcggagaaataggaacacttttatactgttggtgggactgtaaaccagttcaaccattgtggaagacagtgtggcaattcctcaaggatctagaactagaaataccatttggccctgcaatcccattactgggtatatacccaaaggattataaatcattctactataaaaacacatgcacacatatgtttattgcagcactattcacaatagcaaagacttggaaccaacccaaatgtccatcaatactagattgaattaagaaaatatggtacatatacaccatgaaatattatgcagccataaaaaaggatgagttcatgtcctttgtagggacatggacgaagctggaaaccatcattctcagcaaactattgcaaggacaaaaaaccgaacaccgcatgttctcactcataggtgggaattgaacaatgagaacacttggacaca

SEQ ID NO: 482471 - DNA, 1000 bp, Homo Sapiens
gatcccctgccttgggttaagaggggccatcattttgggcctgcagaaggaaggaaaccatggggagtccccagaccccaggatcagggaggtgtaagtaggatggagacagtaaaagaaagcaaaacctatcccacgacactgctggacttgggaaacagaaatcaggctgagagggcggggctaagctcaaaggggaggaggcaggaggcagatgggagaacaaaaagtagaaccagcacacggaaccagggccaagcttgggcagcagaacaaggacccagctggctaggcgcagtggcccacgcctgtaatcccagcattttaggaggtgaggcgggtggatcacctgaggccaggagttcgagaccagcctggccaacaaggtgaaacctcatctctactaaaaatataaaaagtagccaggcgtggtggtgcatgcctgtaatcctagctactcgggaggctgaggcaggagaatcgcttgaactcgggaggtggaggtggcagtgagccgagatcacgccactgtactccagcctgggagacacagtgagaccctgtctctaaaaacaaaacaaggacccagcctagggtgaaggcagttctggaagtggagctaggatgggaggcgtagccaactgagtgaaggaagacggcagggaagctgtgccacatcctgggttcttgtgggaagaacgggaacaagctccccaccataagcagaaaccaaactcagaaaggcagagcagagcccagtgtgtggtggctcacacctgtaaccccagcactttgggacgccacagtgggaggattgcttgagcccgggagtttgagacaagcctgggcaacatagtgagaccttctcccctcttcaaaccgacagaaaaaaattaaccgggcagctggacgtggtggtgcaggtctgcagtcccagctactcttgaaggctgagctgggaggatcacttgagcccaggaggtcgaggttgcagtgagca

SEQ ID NO: 482472 - DNA, 1000 bp, Homo Sapiens; identical to SEQ ID NO: 309034

SEQ ID NO: 482473 - DNA, 1000 bp, Homo Sapiens
gatcttgtaggatggaaaaattgaaagtgccgttttccggctatttggaactactgtcgagcttgtattggagtcaagcggcattgcagaagaaaataaggcatttaggttttaggtcaggtgtgagttgaagaggttttaagtttttgagaacacaggctaaaggagaaggaggaggaatggaaggtggaagcttacccatagtgaaggaggcaagcccagaaaaaagagtagagacacggagaaggggtggggggttctcgccctccagaaaagcagagaaggggttggggcacggaagtaagggattggggcacaaagaggtcagggtgtggaaataagggattggggtgcagagatataagaggttggggtgcggaaataagcgattgggggtttcttgccccctaggaaagcgggacttgccactgagggtgaaggagaaggggttgaggggtacttgcccctgccccaggaaagcgggacttgccactaagggtgaaggaccaaggcgggcgtccctgcgtggtctgacacccttgaaacgtgagtgtataatcagagaggcgtccctgcaatgattaaacaccaagggaaggctgccttcccagtccgtgaccggcgccggagttttgggttcacggataaaacatgtctcttttgtctctaccagaaaatgaaaggaattgaaattaagagaagggagagattgaaatgtggcgccaagattgaaaggagaaagaggttgagggatagtgagggaggttggagaagagagtaaaaagaggccgcttaccggatttgaaattggtgggatgtttcctgggctggttggactgaggacctgaggtggtaggtggatctttctcacggagcaaagagcaggaggacaggggattgacctcccaagggaggtcccccgatccgagtcacggcaccaaatttcatgcgcgtctgtgtgaagagaccaccaaacaggctttgtgtgagaagcatggct

SEQ ID NO: 482474 - DNA, 1000 bp, Homo Sapiens; identical to SEQ ID NO: 309035

SEQ ID NO: 482475 - DNA, 1000 bp, Homo Sapiens; identical to SEQ ID NO: 309036

SEQ ID NO: 482476 - DNA, 1000 bp, Homo Sapiens
caccttcacatctagtctcacactaataccaccctgctatttgaggctgataacatccccaatagacagatgaggaaaacaggctcagagaaggtggacagcatagccccaggcaatggaaaacgaagtggtgggaaaggatccaagcccaggtgtcctgactccggcctttttcttgccttatccctccctggttcacaatcaccatggaacctaagaaaggaaaaagaccctgcctgggctccatggcaaaccagttacatcagaatgtctgaagctgaggtactggcatcagtttttgttttaagtgccgccgtcgagtcaaatgttcaccgaggttgagaaacaccaggcttcccaggagggcaggcacgggctgctccacccagggatagcagctccacctggggacagcagccccggggctgactgctctttgcagcaactcagagggcagggggaagggccagctgcagcacgcatgcgccgaatgaaagacaatcagaccccatgcagggactgctgagcttcaagctccaggtccatccagtgcccagagccctctaggccctctccaagcgtctcacctgcttccatccacggggccagtataactcaggggtgggtggctgccacacgctggagttaggggtccccagacccagggcaggagagtttgggcacttctagttacacttttcctcatctgtaaagtgtaactaacaatagtgcctgtttcacggatgcacaaggatccgctgaatgaatacttttggggctgtggccaagtgctggccttggcccggtgcagcctagaacacaccctcctggcatggctccatctattcttggggatctggttttcctgcactccaagaaagctcatcttgtgccatttccaaaagctgtcttgcattccagctacacttatgtcacacctggtaaagggcccgccatccctccgcctccctacactcaccagatggaaggtctggaaggt

SEQ ID NO: 482477 - DNA, 1000 bp, Homo Sapiens; identical to SEQ ID NO: 309038

SEQ ID NO: 482478 - DNA, 1000 bp, Homo Sapiens
ctgttcactcctgttccctaagcctggaccaccttctacacaggctgcagctgctgggaggccccaagctcatgcagcgcaactcttccaaggcccagcctgctcagacgattcggcccaaagcacaaagcatggcagacaccttccgtaagccaaagaactgggagtagtcctccacctgggaccctgacaaccgccaagggcagagaccctcttggccaaacctccaaggcagcatgaagcatggaaggaccttccccagcccagcgcccacagcagcatgctctctcaacagggatcaaagtccacgcccgaccgccatgtgacacagacaaccagtgtagcctgaggacctcaacagcagccccgacattccagcgactggccctcgccactgtgggcttgccactcagatttaaggggaccctcaagaaaagaggataggagcttcagagaagatcaaaccgggtcctctcttctaaggatgctttctggaagggacacaacaggacctcagaaagcagcaatgagcctcctccctacagatcagagaagcacaaacagggtcaggccaggggtctgcccagcaaccacacacaggagtcctaagagaaggttgttggtggccatccccaggccacctcctctgggcttacacatcaggctttgctagttaaggggtggggtgagggggacagcacagtccccacgaatggcactcccaacctttgggagcgtagaaagagcttcacacaataaatacaaacagagctgaggtttctccagccatgagaagaaacaagttggtttgtgtgcctactttggttacctaagtcagtcagtctgagttcacagtataagcaacacatctaaatagaatattgggagctcctgtcagcgctaggtttcccaaacaaagaagccaaaaactaaaagaaaaagggctgcaacaggaattcttagttattagatactaagcgttctgtgcatggcacatttt

SEQ ID NO: 482479 - DNA, 1000 bp, Homo Sapiens; identical to SEQ ID NO: 309039

SEQ ID NO: 482480 - DNA, 820 bp, Homo Sapiens
aacagcatacaaagcagttaggacataaaccccccttccccaggacttttgtcttcccatcaagctggaggatgagctgggtttgttgtctttgaagaaaaagtggtttggctagcagccattttaacaaggctatgacaggtcaacttgaatcacaaagaagtcagaagccaaggagatgcatttttgtaagcctttggtttcttcaggagtgtagcttcctcatgccagtcagccttacaagaaaaataacttggcagtcaagagaaaattgacggcaacagtctttgcaaacagcattcgtagcccaagcactgtgagggacatcatgttcaccttctcggtatgaactatggctttgggtttatggcagctctttgaaggttgctttgtgttttcagtttcctttggttttacgtgatctgtagaatctgtcttcacttcaaagtcagtggagtgcacagttttattgtcgtgttgaactgaacatgtcactgaatttgaatcttcatatttaccaagcttgacagcattgtacttcccactgggagagatgacaatagcaggatcaaactctgttatcttcttggatgacacgagatttattcttatatccttggggtagaattccttcaccagacaagcgacatttgttccatttttcatgacaaaaacggatggtttggtatgaggctgacttcttggttccacagtcacacgggttccttttccaaagatgagtttatcggtgtcacagcacttgaggacgttccaaaaacctcagcgctgctcccacctaccttcttcccgtcagctttag

SEQ ID NO: 482481 - DNA, 1000 bp, Homo Sapiens; identical to SEQ ID NO: 309040

SEQ ID NO: 482482 - DNA, 1000 bp, Homo Sapiens; identical to SEQ ID NO: 120028

SEQ ID NO: 482483 - DNA, 1000 bp, Homo Sapiens
gatcacaaaggggagaatattccaaaatccagaaacagtcataaaacacacccagagtgggtgactttgagcaatgacagcctcatctctctcttttcatgcttggtggcctctgactttcctctcagctgcccgtcctggtcttgctttcttagaccaatactaatggcctggcagctggggccagaccagagcacacagtagtgagggtcagggagctgaaaagggggaagagtgtctgacttatggagatctgactcttcacctatgcacacatcacctgggcagggaatggattagtgaggtgctgtgcaggactcacggtttaagggattgtactaaggagttgtacttctttgatcctgcctgactgagagcaaactctcagaaggcatcacagctttttcctaagaaggcatggctgttatatgaaaccattgcgcttcccttctccctctgttgggttacatttttctatccacttgtttactgagttgtgttccaggaaaaacaaatctcggttgagttttttaaagtcccatacattcagttcagttcaagggtgtctctcatcttagtgatggccaggcacaagactttttaaaaggtgctgcagaaaattttgataaaagcctttgcatcacccataatacctttggggaccattgagcagcaaaaatgatgaggaagaaatctgttatgtgctggagacctttgtgtttgcacctcatctaatgctcacaatgaccctttaagtaggtactattatccctctatcccaagacatcactaacttgtcttttatctcagaattggtgaaaggtggaaccagaattcagactcacatatttctgaatccaaagcttatgtttcagtccacaccattgtaccttccagaattcaaagaaacaaaggatgacggcttctaacagaaataaccatacaagcttcaatgaagagacagggactgaaataagccttaggatgaagaacaatttag

SEQ ID NO: 482484 - DNA, 1000 bp, Homo Sapiens; identical to SEQ ID NO: 309043

SEQ ID NO: 482485 - DNA, 1000 bp, Homo Sapiens
gatcaactatttcatatcagtctttgtttgtaagccacgttattgttaaggagtcagtcagaaccaccctttttggtaattttacgtggctcactcttggcagatctggctgtgagcagggtttaaagttggcttactatatggaattatttttaggacaacttcaatgcactctacactgagctaaaacaaaaaaaaaaaatgaggcttagctcctgactctggacaatctaaatctacatttgctacatccaaagcaaataatttctgtttatttatttattattacataaggagttcattcttattataaaaaggatgaaaccggcaggagcagtggctcacacctgtaatgcctgcaccttgggacgccaaggtgggtggataacttgagtccaggaattcaaaaccagcctcaacaacatggtaaaagcccatctctacaaaaatacaaaaatcaagcatgcatggtggtgtgtgcgtctagtcccagctactcaggagagcaaggtgggaggacggcttgagcctgggaggcacaggttgcagtgagctgagattgcaccactgcactccagcctaggcaacagagtgagaccctatctcaaaaaataattggttaaaacccttgctgtctttattgtttattccttctcttctttttttttccatgacagctgtttcaggacaagaaagttcttttcatctctcagttggggccaatgtcagcatcatgactggtgtactggctggagttactctctttattatatcaaactcttatcagagttttagcaatagtcattttacatgatggtcattcacagatagttgttttgattcttcctgaaagcagttgcaatcagctacagtccaaaattgcttctatttcaaaagatttatggaaaagatactgacaagtactcttgcatacaagtttctgagcagttcaagattatatcactggactgtctatagactttcaaagctttaacagact

SEQ ID NO: 482486 - DNA, 1000 bp, Homo Sapiens; identical to SEQ ID NO: 309045

SEQ ID NO: 482487 - DNA, 1000 bp, Homo Sapiens; identical to SEQ ID NO: 309046

SEQ ID NO: 482488 - DNA, 1000 bp, Homo Sapiens
gatcctcctgtcttagccttccaaagtgctgggattacaggtgtgggccaccatgcccagccaccatcttggtttaatttctttccttggaaatggagcaaagggctttcactcttctttttcatggctgcatagtattccataattgtttaaacaattgataatagacactgtatcggggtgactggtatacccccaaaatcacatctgcccagagcctcaggacatggccttgtttggaaatggttttagcagatgcagctaagatgaggtcaccccgtgttaggatggccccgaatccagtgcctggcacccttataaggagagggaaacttggacgcagacaggaaggccgggtgaagacagaagcagagaccgggggccaaggagtgcctggggttgcccagagccaccacgggctgcaagaggtgtgggacagactctctcagccacagaagggcccagccccgcacaggcctggatttcagagggcgaacatttctgtggccgaagctcccagtgcgtttgcagtccttggagacggccgcagacacatttgttcttggcctgtctccaggtctgtagaccccacagtgagcggccactggccggaggggaacaggaagagctggaggggacgtcacacacatgagccttttaggaataacgagtgacacgtgcaagaccccaaaccaaacaccatgtaacctgacacccagggagggagggagggaggggctgggaggggctcacctgtagggaggggctcacctgtacagcggtgctgggaagctggcctcgagggtccccgaggggatacagggccgtgcagcctcttgcctgagggtttgcatgtctgcctggatcccccgggctcctgccagaaggcctctgaggccaccgttgacagcataaaggccacccagtgtctcggcaaccacgctgaccactccctcctcccagctgcggggtgaggtggcctcgagggaagggctggaga

SEQ ID NO: 482489 - DNA, 1000 bp, Homo Sapiens; identical to SEQ ID NO: 309047

SEQ ID NO: 482490 - DNA, 1000 bp, Homo Sapiens; identical to SEQ ID NO: 309048

SEQ ID NO: 482491 - DNA, 1000 bp, Homo Sapiens; identical to SEQ ID NO: 309049

SEQ ID NO: 482492 - DNA, 1000 bp, Homo Sapiens
gatccgccccgtcgttcctggccctgggctttgccaccctatgctgacaccccgtcccagtcccccttaccattccccttcgaccaccccacttccgaattggagccgcttcaactggccctgggcttagccactctgtgctgaccactctgccccaggcctccttaccattccccttcgacctactctcttccgcattggagtcgctttaactggccctggctttggcagcctgtgctgacccatgcagtcctccttaccatccctccctcgacttcccctcttccgatgttgagcccctccagccggtcctggactttgtctccttccctgccctgccctctcctgaacctgagccagctcccatagctcagtctggtctatctgcctggccctggccattgtcactttgcgctgccctcctctcgcccccgagtgcccttgctgtgccgccggaactctgccctctaacgctgccgtctctctcctgagtccggaccactttgagctctactggcttctgcgccgcctctggcccactgtttccccttcccaggcaggtcctgctttctctgacctgcattctctcccctgggcctgtgccgctttctgtctgcagcttgtggcctgggtcacctctacggctggcccagatccttccctgccgcctccttcaggttccgtcttcctccactccctcttccccttgctctctgctgtgttgctgcccaaggatgctctttccggagcacttccttctcggcgctgcaccacgtgatgtcctctgagcggatcctccccgtgtctgggtcctctccgggcatctctcctccctcacccaaccccatgccgtcttcactcgctgggttcccttttccttctccttctggggcctgtgccatctctcgtttcttaggatggccttctccgacggatgtctcccttgcgtcccgcctccccttcttgtaggcctgcatcatcaccgtttttctggacaacc

SEQ ID NO: 482493 - DNA, 1000 bp, Homo Sapiens; identical to SEQ ID NO: 309052

SEQ ID NO: 482494 - DNA, 1000 bp, Homo Sapiens; identical to SEQ ID NO: 309053

SEQ ID NO: 482495 - DNA, 1000 bp, Homo Sapiens; identical to SEQ ID NO: 309054

SEQ ID NO: 482496 - DNA, 1000 bp, Homo Sapiens; identical to SEQ ID NO: 309055

SEQ ID NO: 482497 - DNA, 1000 bp, Homo Sapiens
gatcacttgaggtcaggagttcaagaccagcctggccaacatggtgaaaccccgtctctactaaaaatacaaaaattagccgggtgtggtgggggcgcctgtagtcccagctactcgggaggctgaggcaggagaatggcgtcaacccaggaggcggaacttgtagtgagccgagatcgcgccactgcactccagcctgggtgacagaaccagactccatctcaaaaaaaacaacaaaaaaacaactggacgtcccctgcagagtaagcgagaagagttttgcttgtgttgaagccactgaggtttggggttgttggttcctgtcgtgctcgcagcttctgactgacaggtctgtgggccgggattacccagcgccatccaccaccacttctgcataaatgctctcctctctgggggcggcagccctggtccagctccgcaagcatccacgcggcccctcggtgtgcagggctctgtgcctggcccaggcctgcctcgggtgttcgtctgcccctcccagctgtgtgcactctccttttctgcacctggccttgtgcatctacggagtgggggttcttgtgaggacgggagaacggggctggagccaggtgctcaggacagcagctggcatacgtgtgggaggccccacctgcttattttgggctgtaattagggctgcagctcagccacagctgccttgaggggcaggaagacacacaaagaggtaattacagcctggtgagatcacagccatgatgacggcaggagacaggaaggtgacagcccacttcaaggcggccgcatacccgcccctcctgggctcccgggcggctcccagcagaatcatcgggtgagggaggaggaggaagaggaaggcagcaagctctgggctcggaggaggaggccggggctggaacgtcagctctgcctgtgacggtggcctctgggccttggtttccctgattgcaaaatggaaagcgggagcccagccagggctccg

SEQ ID NO: 482498 - DNA, 1000 bp, Homo Sapiens; identical to SEQ ID NO: 309056

SEQ ID NO: 482499 - DNA, 1000 bp, Homo Sapiens
aatttgcagaactgatggggattaataactggcgctctgactttaagtggtgcaggaggcggccagtaggggacgccagccgttacgccgggagcaagagggccctgcgtagtccccatctgcctgcatgtggcgtgcagccacgacaatggcagcaagagggcccggcagtgtgcccagctgccagcaggcgggtgtgctgccactataatgtgaggaagagggccctgcaatgtccctagctgccagcaggcggcgtgccaccactatactgcgagcaagagagccctgccgagccccggcgccagcagggggcgctggacagcactgtaagcaagagggccctgcagttgtcctagtcgccagtaggggacgcaatggcagagcaccgtgggcaagctggtcctgtagtgcccggctgcaagcagggggcgcccgaaacgggcttttcagattactcaggttccactcgtctctgcgccgccggggacgtgtgtctctgcgcgtgcaccgcgccacccccgcgctccccgcccggcggcgcgcgactgtgcgactgcaacactccccgccaccctcagcccagcgacgtgcgtctctgcgcctgcgccgcgcctcactcccgcccgctcagcgacccctccccttccggggaggcgccggcgtgcgtctaccccctgcgccgcgtctccccaacagcggcgcgcctctctgcgcctgcgccggcgccccgcgcctctctgcgcctgcgccggcgccccgcgcctctctgcgcctgcgccggcgcgccgcctttgcgagggcggagttgcgttgtctttagcacacacccggagagcatcgcgagggcggagctgcgttctcctctgcacagacttcgggggtattgcgaaggcggagcagagttcttatcaggtcagacccgggcgggcgggctgagggcactgcgagggtggagctgcgttctgttcagcacagacgtggggggcaccgtaaaggc

SEQ ID NO: 482500 - DNA, 1000 bp, Homo Sapiens
gggcatcatcacagcaggggagatagtatcagcttcatctcaaggagagaagacataattagcagattggttaatctgggaataatctgcagactgagggagtggccttggcacaaaccacagcatgcacagtgatgggagccattaaccttggttagacatcagcaggcaccagtaggggccaggcaccagtaccgtggtcactgttagcatttgcaaacacctgacttgtaatatcctaatttgattctaaataactttgagggggagggtcccgaaattcatatgtagttcccatggttaaacaattcaagtgagaaaagaaacactttcaaaataggttgggtattgctcaaatatggaagatggcaaggtggtgctttttagtattgagttattcagtatttcacaaaggagagtttcagagatgttttgagcactaacagcattgtgtctccccaggaggatgtataagctctgggtgcttgtttgaaatcaattttgtcctctcataatcacacctcatgtgtaactgacaagcagagagtgaactctgggttcagtcctgccattgattcttcctcactgtgaggaagagaaaaaattagtagcacaattcctggcatttggtaggtgttcaataaatattaacttctgtcatccctgctagggacttaaaagaatgagtggaactgtctagagatgctcaccgttgcattttactgagtaaggtcccatgagaaatatgtttatcatattcagacgaggcctcttgtcctagtgatcctacttgttttatgctggcctaagtggatgctgggactcactgtgcttaatgaatgttaatgaaggtgatgaagaccttttaggagatgattaacctataaagtcctccttctgctttcaagtggctttataagaagcacacagagagtcaacactttgaaaagaatgaatacaaatgagaatcatgtctgctttgcaagaggaaagtttatta

SEQ ID NO: 482501 - DNA, 1000 bp, Homo Sapiens
aaaataagagacacctggttgcagttattgtggccaaagcaaagcctattgtgccacattcagggctatatccatccagtcggtgagagtatgtgaggcagagaggccagggacaggcacagaatgtccaggcgggagaatcacttgcaagaaaagatgtctgggatttggtaccagagggagccctaagctctcaggctaggataacgaatgtgagtaaaaccccagggtccaggtgtcctgactgcactggttacccacctgccagcctctagccttcattttctatgtacctgagtggcacctcctgtcacacctagccatgggacctcataggtagagcttgttaagggtgtgacctggccaagaaaggtggggacaggtcggatctccacaaccccatcacactgagggtcagggagggtcatggccacttcttaaaacatgactcttgtgggttcctcattagaagagcccaccaaacagtcttgtcctctgacagcccaatgaatgcttttttggattcagttaggctacttggagtgagaaacaggcctaatgacaacagaagatggcttttattattgcatgtacatgaacaaggaatatggccaaactttccagccaccaacgtagaatctagggccccgatgctgagagtgggttctgctactatctcttcagctcctttttctctctgggaggaagagattgtacctgctggttcctagggagccccaataaaccaatatccactgaacaccttctagatgccaggaacattagatgcattacccctcaaccacagtgagagggaaatacaactatcctacttccacaaacaaggaataggtctcaagagaatgcagtgacctggccaacttcactcagcaaggtgggttcaaatcccacttcagagtcaccaaggtgggatttgaacccaagtttccctgaccctagagaagatccacctccaccacactatgccaccatgaagaag

SEQ ID NO: 482502 - DNA, 1000 bp, Homo Sapiens; identical to SEQ ID NO: 309058

SEQ ID NO: 482503 - DNA, 1000 bp, Homo Sapiens
gaattcatttaagacagggaatactttattcaaaacccatcacagaaatggacagcttgggtctgtaacaaaggcattcatgttttagagcataggtcagtaattgatatgagagcatacactgctacatacaaattaactgatcagaccacaacattttcaatgtttaaaacagaataagcttccctgtaaaagcagcacctttgtgacgttttaactttagtattcctctccttcttcctcaccctctccttcaacagaatgcacaccaacctcctcataatccttctcaagggcagccatgtcctcacgggcctctgaaaactcaccttcctccatcccctccccaacgtaccagtgaacaaaggcacgtttggcatacatcaggtcaaacttgtggtccaggcgagcccaggcctcagcaatggctgtggtgttgctcagcatgcacacagctctctgtaccttggccaggtctccaccaggcaccacagtgggaggctggtagttgatgccaaccttgaagccagtggggcaccaatccacaaactggatggtacgcttggtcttgatggtggcaatggcagcattgacatctttgggaaccacgtcaccacggtacaacaggcagcaagccatgtatttaccatggccagggtcacatttcaccatctggttggctggctcaaagcaagcattggtgatctctgctacagaaagctgttcatggtaggctttctcagcagagatgacaggggcatatgtggccagagggaagtggatgcggggatagggcaccaggttggtctggaattctgtcaggtcaacattcagggctccatcaaatctcagggaagcagtgatggaggacacaatttgacctattaacctattcaggttagtataggttggacgctcaatatcgaggtttctacgacagatgtcatagatggcctcattgtctaccatgaaggcacaatcagagtgctccagggtggtg

SEQ ID NO: 482504 - DNA, 1000 bp, Homo Sapiens
gcagatacccagggcccagggcagccccacacttctctgaagcctgggtgtccagcccatgctggtcctgggcacataagccccagctcagctgcagcctggctccccgcagccatgcaggacaactacgccctgacattcggcaacagcacccggagggcctactggaaggaatgggcaaagcgaaaccacacacttagaataagctttaatggtggtgtctgtacagcatggatgtggacagggaaaacagcaagtgcacacagtgggacaggccacaggacaggctgggagtgaataaagagttcacactgcttccctgctttccccagtgactgaaggctctaggccacctcctcctcagcctcctcctcgaactcgccctcctcctcggctgtggcatcctggtactgctggtactcggacaccaggtcattcatgttgctctcggcctcggtgaactccatctcgtccatgccctcgcccgtgtaccagtgcaggaaggccttgcgccggaacatggccgtgaactgctcggagatgcgcttgaacagctcctggatggccgtgctgttgccaatgaaggtggcggacatttttagcccccgaggtgggatgtcacagacagccgttttcacattgttggggatccactcaacaaaatagctgctgtttttgttttggacattaagcatttgctcatccacctccttcatggacatccggcccctgaacacggcggcaaccgtcaggtagcggccatggcgggggtcgcaggcagccatcatgttcttggcatcaaacatctgctgggtgagctcgggcacggtcagcgcccggtactgctggctgccccggctggtcagtggggcaaagccgggcatgaagaagtgcagccggggaaacgggaccatgttcacagccagcttccgcaggtcagcattgagctggcctgggaagcgcaggcaggtggtgaccccactcatggtagcagacacca

SEQ ID NO: 482505 - DNA, 1000 bp, Homo Sapiens
cggagggtgattcctaccttagagatgaagaaactgaggcccagagactgcccagctaccagaaggtggatagagcgctggcctccatgcctgcctgacctggagtctgtccagtgcccacccacagaacagcctcggccctttcccatgcccagacacagatggcacacttgcgacggcccactcatagcagcttcttgtccagctttattgggaggccagcatgcctggaggggggccaggcatgaggtggggtaggagagcactgagaatactgtcccttttaagcaacctacaggggcagccctggagattgcaggacccaaggagctggcaggatggataggcaggtggacttggggtattgaggtctcaggcagccacggctgaagttggtctgacctcagggtccaaatcccagaactcagagaacttgtccttaacggtgctccagtagtctttcagggaactgaagccatcggtcacccagcccctaaatcagtcaggggaagcaacagagcagggcatgagaactcctctgtaggcaaccatgggacccacacccatgtccccactggacgacaccagtcaggaccacaccaccctctcaacttcactggacgacagccctgagacctcaggcaggaatcccccacagctgccaccctgggagaagagatatccttgcaggaaccccagcacaagtcaaaccctgccatctccaggtcacctcagatgtttatgcccctgggcctgaggcacaaagtgacagggtggggagatgtgaaaggtcaaggctgtcattgttttctgtgcaaacagcaccacctggagttgcacaacctggtggctctgagcagggtaggacagagggaggcagcctctcatttggaaagtcattggaggattgattagttgtgtgatctggggcaggtcacctaatcgctctgagcctcaattttctcatctgcaaagtgagaaaataacacctaccccaaag

SEQ ID NO: 482506 - DNA, 1000 bp, Homo Sapiens
aaccgaggctcagagagattatataacttgcccacgatcttcctccagcaagatggaggccaagtgaaatgagaaagcaggtctcctgccacttcctttgcccagaggtcttctccccacaccagggcttcccaagggctgagatccagtcacacctgtgcgtgatcaaatataagtgtgaacaatgcaaagggagacgtcttcaatctaaggggcttcaattctgtaatgtaattctgagattatgcccttttttgttaaagcctttcctttttgaagtgatggtcactgtagatggtgagggttttttggaggcggacaatatctttacatgacaaaattaaaagttggcagctccgaattgatctctggagtgttttgaaatgcaagaggtctccgaaacctcagtctgggagccacggagggctctcccctctccccaggtttaccagtttgggaggcttggagagaggcctggaggacctgctggggactaaagaagagcactggtgggaggacagggcgggggaagggggaggggagtgaagtagtctccctggaatgctggtggtgggggaggcagtctccttggtggaggagtcccagcgtccctcccctcccctcctctgccaacacaatggacaatggcaactgcccacacactcccatggaggggaaggggatgagtgcagggaaccccgaccccacccgggagacctgcaagcctgcagacactcccctcccgcccccactgaacccttgacccctgccctgcagcccccgcagcttgctgtttgcccactctatttgcccagccccagggacagagctgatccttgaactcttaagttccacattgccaggaccagtgagcagcaacagggccggggctgggcttatcagcctcccagcccagaccctggctgcagacataaataggccctgcaagagctggctgcttagagactgcgagaaggaggtgcgtcctgctgcctgcccc

SEQ ID NO: 482507 - DNA, 1000 bp, Homo Sapiens; identical to SEQ ID NO: 309060

SEQ ID NO: 482508 - DNA, 1000 bp, Homo Sapiens; identical to SEQ ID NO: 309061

SEQ ID NO: 482509 - DNA, 1000 bp, Homo Sapiens
ccaaaagaaaggacatggaagtaaataataaagattaaagtaggccaggcacagtggctcatgcctgtaattccggcactttgggagactgaggcaggaggattatttgaggccaagagttcaaggccagcccgggcaacatgggcagaccttgtctctacaaaaaaaaattatcaaaattagccaagtgtggtggtgcaccactgtagtcccagctacttgggaggctgaggtgggaggattgcttgagcccaggaggtagaggctacagtgagctgagacaatgccactgactgcacgtcagtctgagtgacagagagagaccttgtctcaggaaaaaacaagcaaaaaaagatgaaagtagaagaaaagaatgaggggaaaaaaacagaaaaacagatctwattaataattcaaaattctgtagtttttgaaaaaaataacaaaataaaatagataaaccattagataacttaaggaaaaaaggggaaaagcacagaaacacaaaatgagggcatggaggaaataagatgaaaaaatttaaaaataataaaggatgtctttgtagacctctaccaacataaatttgaaaacgccagatgaaagggataatttgctagaaaagtacagatcactaaaattttctccattagatgttagaaagcttaaatagaccaatttccacagaaaaaaaaattgagaaagttataaaggaaatatcacatgaaaaagcgtcaggcccagatggtttcacagggaattctaccaaatcttcaaacacgagatagcctcaatgctctataaattgttccagagacagtacggcacaagaaggatcaagcctgcggaaaatcaacctttggaggaagatgaaccagcaaaggagaaactgagaaggaacttcccaggaggaagaagggaaccttggaacacagaatctcagaaacaaaagaaggatgtttcaaaaagggagactttcatggtaaatactgcagmsagw

SEQ ID NO: 482510 - DNA, 1000 bp, Homo Sapiens
taaatacccagtctcaggtattctattacagcaacagaaaacagactaagacaccaccttaggaaaaaggatctttttataaggcttagcccaggttccctgggagttcatttgtttgcattggtattggggtcaaaacttcgtgtactatcagtgttacctggccttctatttcataatccttatcttccttcagcagccacacctagagtgagtgagcaggattttggcatttctgttttcctgctataaaataccaaggtcggccaggcacagtggctcatgcctgtaatcccagcacttatggaggccgaggtgggtggatcacctgagtctggagttctagaccagcctggccaaaatggtgaaaccccatctctactaaaaatacaaaaattagcgaggtatggtggcatgtgcctataatcccagctactagggaagctgaggcaggtgaatcactggaacccaggaagtggatcacaccactgcactccagcctgggcaacggagcaagacactacctcaaaaaaaaaaaacaaaaaaacaaaaaaaaaaaacaaaaaacagggcccagggagtttaggctggtaatagccacaaaaagcttacagtctagttgcaagaaaagatcacacccaccatcgttaaagccagtgtgaaacaacatgggaataagtgtctgatggaggattaaaggcaagaaggtattgttaaggatgaaaaatatttccacatttgttcctgaaacctgtttcccaggttggttaattgtggtcacattccacttggccttaggtgtgtgcttatgtaaactacagaaactgtttcaatgacacctgctttccctgtctctaaatgaggaataaaacctgccctgctgacttctcagaggatcagtctgagacagaaacaagataacgcatgcacagtgctaccaaactggggagtcttcatagctcacttctgtggctgctcctagggcccacttttaactctt

SEQ ID NO: 482511 - DNA, 1000 bp, Homo Sapiens
gttactgagctctccactccctcatctgtaaaatgggggtagcagttgttgttgtgaggattaaatgggataatacatgtgaagtgtttagtgtattgtcctacgcaataaatgttagcttctgttagcattagtcctcaacagtccttttaacctcagtgtaaattcctccctgaaagcagtgtttgatgagactgtgttaaaatcttctggagttagagccaccatgagaacacaggatgctcagtgggcaaatgggacctcctttcaggcagattctaattggaaacgctgttcacgccacaaagaaacagtacatgaacccaaccagaggttacgggacagggaagagaggagaaagcttgatatgggttggagtgttgagggtttattcaaagcccatggggagaaattaggatacagatggaaaatagtattttagttaacagaaagtggaaagattccattccagaactcctgtcctgggccagaaccctttaaaagctcttgactctgaaacaggtgtcaggccagctctcagggaaagccaaaggggcaggtggaaggcaagagagaggagggagggtggctttccacaccctggcagtgtgacatcaccactaccaacaggagacagctcagtgcagacactgccaaaccgggtgcttgatattggtggtggccccatctaagtttattctctcagatccccccaccttccctttcctctaaatgtgaaacaaaagaaactaaatgccttgatggtaaatgcatagtcatcatcctttttaaaattaaagtatcaaaacataaacttggctacataaaacaatttttaatgcatttgtgatagaccttcatttacacttaccatacacatcaagttttcttgccatagccaccatccgcccccaacttccttcctctctaatccattgttgttcctggcagcttacaaattgtcttgcgtttcataatggctggtggctggtgcctctac

SEQ ID NO: 482512 - DNA, 1000 bp, Homo Sapiens
aaaaaagtcgcgtggatgagtctctggtgttagagaaccttctggcttaaaaatgcttcaggactacaaagaggtagctgtgaggactatccggtctgtgtacctaatccaggctactggactggggggcgctgccgcgcctgcagcctatggttaggtttacacatggagcggtcagtcatgctacagcaggaccttggtgaccatatcattgtcactgttgttgtcatggatgtcagggtcctccttggggagcagaggcaggggagagggcggttccgggacctgtgcaccggggctctgcttctttatccacttactcagtgcttcacgctctacctgtagctggtggcgctcctgctccacggattgtgcctcctgcttcagagcctggcgcttgcgctccagctcgagttccgcctgcattagggccgcctcgcgccgctccagctccagctcccgctggctgccccgcatggccagctcacccatctgctccaacaggcgtgcccagtcgccctcggcagccatggtggggctgggcggcggcgggcagggcatggtggtcggcgagctcggagcagcgctcttcttcagctccggcaggtgcacatcactcaggtgctggcacagcgcccgcgtccacatctggaagttggggaggccacccacttgcagcccgcacaggcggcaggtggcccaggcgctcatcatccggtgcctaggctgagctgggtccagatggaagtagccccaggcctcggagtatgatggccccacgggcgcgggacagaggccgccttgttccgctgggtcattaagcctccggctgtcttccatggtgatcttcaggggctttttactcttcattccttctgcagtgtaggctgtggtccagctaacccaacagtagctgtctatgaatggaaaatccaagaatctagtagttgtgtctcagctggtcttcaatagaagctggaatcctgcaggagtaaccgcc

SEQ ID NO: 482513 - DNA, 1000 bp, Homo Sapiens; identical to SEQ ID NO: 309062

SEQ ID NO: 482514 - DNA, 1000 bp, Homo Sapiens
tgaaaaagttatgggataaaaaatgctgtggaaaagttgcggcaaaagttgtggaaaaaaagtagaaaaatgttttatgaaaagtttttgaaaaagttatgaataaagttactggatttttttaaaaaactcaagggataaaaataaaagcaggtctctgtcagcataagcccagagaagtggggctggagtctccatccctaccatgttcttaccaacccttcccagtcacccctttaccattagggtagcaagacaagacccctgtctaatggggggagaaaaacagaccctttgccaccttgaccagggctgagtccttaagtttctggatgatgatgattattatttaagagccagaggctggtagagctggtttgtttggaggaggcctgatggcctccctactctcaccaaagcaacttttccctcagggggctcccatcttattcagagaggcagctgaggtgggacagtggagctaaccgtagagcaggcgagggcatgggctgctgtggtggccccccttccgcagtgtacatatagtatctgtgtaacattttgtatattccgggtggtagggccaccccctgtatagtacctagcggaggttggagctggcatatgaggaggaggttctaatcattatttgtggctgggaaacttatttattgatagcataggacagaggaaggaggaggggatggggtcctggctgccttggtgatgcgactcctgtttattttgctttccattttggaataaatggatttagccatactgctcagcgtggtgggttcccatttccctcactgggtcctggagtttgtgccactgaatgaagagccccagagtgagcatgtccagctgggctgttggggaccttccaggcctgttacttgtatgctgcctggtgacacctggtggattgcatggggactgccatggcgcctatggggcacagtccgaccctgacagccaacaggctcagaagcctgat

SEQ ID NO: 482515 - DNA, 1000 bp, Homo Sapiens
aatggagggagacaaagagaccctttaccaccttgaccaagcctgagtccttacatttctggatgatgatgtttgttatgtaagagccagaggttggtggagttggtttgtttggaggaggtctgatggcctccttactctcaccaaagcaacttttccctcaggggggctcccatcttcttactcagagaggcagctgaggcgggacagtggagataactgtagatgaggtgagggcacaggctgctgggggtggccccccttcccccgtgtacatactgtatctgtgtaacattctgtatcgtacctaccggaggttgcagctggcatatgaggaagaggttcttataattgttcacggctgggaaacttatttattgctagcataggagcaaggaaggaggcggggatggggtcatggctccctggtgatggtactcggttttttttttttttttttttgcttttgattttggaataaatggatttagccatactgctcggcctggtatgttcctgtttccctcactgggtcctgcagtttgtcccactgaatgaggagccccagagtgtctcagaatgtccagctgggctgttggggaccttccaggcctgttacctgtatgctgcctggtgacacctggtggatttcatggggactgccatgtcacctacggagtacagtctggccctgacagccaactggttgagaagcctgatgtagctgtggcagggaaggcagatacctgcgcccaagggcactgacttccatccaccctaagtgtcttccgttctgtccccctgcctccctctcctgtctgcaccaggtggcctgtctgtccctccagagtgccggctgccccgcaggttccctccaggctgagttcagggccctgtcccctagtggccagagctggcttcacagggtgagatccagctaagctccagggactttccaggaaaagtgtcccttgaaaagggtgtgaccttttcactgctc

SEQ ID NO: 482516 - DNA, 1000 bp, Homo Sapiens; identical to SEQ ID NO: 309065

SEQ ID NO: 482517 - DNA, 1000 bp, Homo Sapiens
agcattcctgctgatgttactcagaatgtgtcaggatcaggaggacaagtgaggggggaggcgtgcaatgtgatcagaaccctatgatttctgattcctgaaattaaagacacaatgtgccttatgtttgtatgtctggagcttaaactatagattcctctggttgtgggtgcctgttgtttatgaactggaaaggaatgataaagccgcaatcaagatcacacaacacaagaaattttacaaaaggaaaaaatattttgtttgaaaatctttgctacatgtcattatttttgccactgtaaagcttagcacagatgccagcaatacagaaatggccaacaagaaaacaaaacagtcaaaaataaaaccctgaaggaaaagcaaaaacaaaacccccagagcatcttctcgctatcctccccttccccaaaagccctataataactgtacaatattatagtcctgatcacatttaaaaagtcgattattaaaaaacaagggttccattggaaactcaactttttggtttcgtaaattgtgatataaatatatatgtatactgtaagtgtgcacatagaataaaaaaataaactgtctccttttttactccactacctggcaccagactggagacataaggaagggaaactcagcaaatggacattcctttggcctcttcaaggccacccttgctcctcagtcccctatgactacatttaatatatcttctcattaattcagtcttgcactttagctactggccaaagccaatttaaaaaaaaaaaaaaaaaagctggtatctacgactgttacctgaggaaggtaaagggtgagggtagtaacctgtatccgcatttatatggctattattgttaattaccaagtgaccctgttgagatgggtgtccagggccccatctatcatacggaattatgatacttgcactctaaagcaaaacccaatctcaagattggagggagcaaagaggaaaaacctctta

SEQ ID NO: 482518 - DNA, 1000 bp, Homo Sapiens; identical to SEQ ID NO: 309066

SEQ ID NO: 482519 - DNA, 1000 bp, Homo Sapiens
gaattcggatctgaccccacatttcccttccacactgccctagcagaggttttccatgagggccccacccctgcagcaaccttctgcctggacatccaggtgtttccacacatcttctgaaatctaggcagaggttcccaaaccccagttgttgacttctgtgcactcgcaggctaaacaccacatggaagctgccaaggcttgggccttgcaccctctgaagccatggcccaagctctgcattgggccctttcagccatggctggagtggctgggacacagggtaacaagtccctaggttgcacatggcagagagaccctgggcccggcccatgaaaccactttttcctcctaggcctctgagcctgtgatgggaggggctgctgtgaagacctctgacatgccctggagacattttccccattgtcttggggattaacatttggctaattgtttcttatgcaaattgctacagctggcttgcatttctcctcagaaaatgggattttcttttctattgcattgtgaggttgcaaattctccaaacttatatgccctgcttcccttataaaactgaatgccgttaacagcacaaaatagcctcttgaatgctttgctgcttagacatttcttctgccagataccctaaatcatctctctcaagttcaaaattccacagatctctagagcaggggtaaaatgccaccagtctctttgctaaaacttaacaagagtcacctttgctccagttcccaacaagtttctcatctccctgtgagacccacctcaacctggagttcgttgtccatatcattatcaacattttgatcaaagccattcaacaagtctctagggagttccaaactttctcacattttcctgtcttcttctgagtcctccaaactgttccaacctctgcctgttacccagttccaaagtcgcttccacattttcaggtatcttttcagcaatatctcactctactggtacaaatttactc

SEQ ID NO: 482520 - DNA, 1000 bp, Homo Sapiens; identical to SEQ ID NO: 309067

SEQ ID NO: 482521 - DNA, 1000 bp, Homo Sapiens; identical to SEQ ID NO: 309068

SEQ ID NO: 482522 - DNA, 1000 bp, Homo Sapiens; identical to SEQ ID NO: 309069

SEQ ID NO: 482523 - DNA, 1000 bp, Homo Sapiens
gcggccgctgcaggctcaacggatcactcacctagagccagacaccctggaatgcaaagtcaaacggccttagaaagcctcactatgaacaaagctagtggaggtgatggaattccagttgagctatttcaaatcttaaaaggtgatgctgtgaaagtgctgcactcaatatgtcagcaaatttggaaaactcagcagtggccacaggactgccacaatcccaaagaaaagcaatgacaaagtatgttcaaacacccacatgattgcactcatctcacatgctagcaaaataactctcaaaattctccaagccaggcttcaacagtacgtggaccatgaacttccagatgttcaagctggatttagaaaaggcagaggaaccagagatcaaattgccaacatccattggatcatcaaaaaagcacgagagttccagaaaaacatctgctttattgactacgctaaagcctttgattgtgtggatcacaataaactgtggaaaattcttcaagagatgggaataccagaccactttacctgcctcctgagaaatctgtatacaggtccagaagcagcagttagaactggacatggaacaacagactggttccaaactgcgaaaggggtacatcaaggaatattcattggaaggattgatgctgaagctgaaactcctatactttggccacctaatgtgaagatctgactcattggaaaagactccaatgtctgggaaagattgaaggcaggagaagaggatgacagaggatgagatggttggatgggatcactgactcaatggacatgagtttgagtaagctccaggggttggtggtggacaggaaagcctggcgtgctgcagtccacaaggtcacaaagattcggacatgactgagtgactgaactgatactgatgtgctcaacaaatgtatcttgaacttgtgtgaagttctatggtcacatgtaaaggaagaataatcaggattagctgtgtgtctta

SEQ ID NO: 482524 - DNA, 1000 bp, Homo Sapiens
acccccctgcaaagttgcctgaaccaggccccttaccgggtgtttcaaccagtgatctttaatggtgggcctcatcttcttgtgcaccaccacctcctgcagctcctccaacgaagggtgctggccaatctcttcctcaaagggcagcatgtactcatccacgggtcctaggagaaagagagagcctggcaggatcactctaaggtcccactgctccctatcactcaatctaggatgcccagggctgccatcctacttaccgtctgcagccttgcagcgagacacaagctcccacagcaccaaccccatggcatacatgtcaatgcgcaggaaggcatctctctggaagttgatggctccctcgagcacctcaggagccatgtaccgtctcgtgcctacctatgtgaggacagaggagggcaggatttacagtgactggccatacacacacagctgggacatgggagttacagcctctgtgcaccagatggcgggcaagacagagcaattcagacaggttatcaatgatagcaaacctcgattcaccacattcacaacagttacaagaggtcacagcatcaattatacttggataataatttttaaatactatatcctggagataatagtaatctaaaatggaattgttaccaaattaatacaaggaactacagatgatatgtatctgactgagattaagaccaaaaacaaagagggaaggagaacacttaaaaaataataacagtgattgttttaggaatgatttcctaagtttaatttttagttactttttccaggttctttgtttggatccttagtacatttctttgttttgtcttaggaattaaaactaaaaaagtgagagaaagactaagattgcaaggactagtggtcaaaaccccagtggggaatctctacatttcccagctgactgtcctacggaagctaaactacactgccttcctggtcttggtttctccactggtcaaacaagagcatt

SEQ ID NO: 482525 - DNA, 1000 bp, Homo Sapiens
aaacaaaggaaaacattcaacaaacaatgcaatttactctcctattgaatttgcttttaagcatgtgctgttaagcaataacatcaggcattttggattacatgtaaaattttattctgaaaattttaatgcagatattacatctaaatagttcttaaaaagcattagcaagtacgaaattactttgaaaaaaattcctcttcctttgaatacctcaaaaaattaatggaggaagttagtatctacctctctccacaaaaccaacaggtttcttttagcaagacacaggtaacgatgcagaaataacatgtcaattttcgatttgaaaacaaggtttggtatgcaataactattattttgaatacttgctttaatatctgcttctggctcttttttccagatcaactttccccaccatctcctgtagatgccacataacttgagctaccacatgtttcacgaggagcagggtgcaccctacctagagaaggtggattccttaggtcttttctgccaacatgctcatgaccacaggaataaaaatcaccacatctccttgcgtaactctcttgacttctgccgtatctatctcatgtattgttataatcatggcggcttcttccaccgtaagacaactgaggccctcatgctggtggtgcaccatgagaggtacctgcagggttggtaaaataatatgttggactacatttaaacatcattacagctatcactaaagcatgaattaaagtactatttggaaatatctacttttgtctgcctttgttgacaggatattaattatgcctgcaagagtcagaaagttttattaaaaagaagtgtaagagtagtatttgaagcttaacaaatttaactctaaagtaaacattgagtcatattttctgaatgtgtagtgaagttctcaccttcatatcattccctgtgctttatactgctaagaatgctcaatatttaaacatgttatatttgtcctttatacttt

SEQ ID NO: 482526 - DNA, 1000 bp, Homo Sapiens
atcaggagaggaaggaactacttccagaaaaaaagtatagaatagaaatgacatatctgacccaatcgagttttcagtttttcttttcttttctttttttaggtttaaatacatttttattaaatgttagaataaatttatacacagttcacaaattctttacaaagaattgccaatctttgtccaattttgtagtagtctctatacagattcagaaattctgctgtgaacagggtttataaaatatttcttttagagagcatcacaatgctaattttaggcaaaataatgttttaaaactgaagtctttgcatggaggtgagctcaaacacccttattctttattccagtgatgaaataatgagaaaaataaacattaaactgacttaccaagaaaacaatgaataagtaattctgtaaacttctcaaattctcctaaaattttttattactttcagaagcaatacttttgcaaggtatcaacaaccacactatgtacccaaataaaatgaatgtcagaaataaaaatactgtcacaaagaagcaccccttattggaagatgtattgaagaagtcttattacactgaaagtttatggcacagaccataaactcagagtctcttcacacataataacaattcatccattttgaaatgagtaacttctcctttgtagtgttgctagtataaaaaaagatacaagttcaaaatatgctggcaacatacaaaagtggccaatagttttggtctttgagagtacgccctgcagtttaacaaagactggctttggatcttccattcaaaagcacacttctcttccaaaaggatgactgcccaactgatgccatcccagagagcagatatcccaaccaccaacttgaaatggctgaacaaagaaaactaaccaattacttcaaagatgggaagcaaaatcaatgtcaaggtatttaaaatcataagaaattttaaaattcaatttttgaaaaatttcccctgagct

SEQ ID NO: 482527 - DNA, 1000 bp, Homo Sapiens
taactttaacttcatcgaacgaaagaggagtgacacatacatgggcataattcagactgataccttttattatggtttatatatcactaactacatttcagatttatggtaaagaaatacttgagcttctcattgcaggtgaaataagttattagagtgaggccaacattacttttaatcctgtgtttgctagagaattccccttaataattctaacagttcctagcagtattctttgattgtagtcttcttcatctaatgaattcttccatttcctaggtcccctggtagtggttccctggtgtcccattctaaaaattgcttgttcagttcctttgttgggttggagtcttgctcttatgaggtcagagtgcataggtgagatgatggcttactacagccttaaactcctgggctcaggcaattctcctgtttcattttcctgagttgctgcaactatagccatgcaccaccatatctagctaagttttttcccctatatttttgtagagagaggatctcaccacattgacaaaactgacattaaagcccggggctcaagcagtccaggtgcctcacccttccacactggcccacagtgtgagccagttagcctggccatctaggttttgagacctcaataattctaatccgtgaggcatttttcctgcttatataaagattgaaaagaactgcaagaatatttagcagaaaaagattcactgagcttaaacattatttaaaaaataatttaaggcttgtaagttagacatgaaggagtccaatattcttaaattaagtggatatcacagaagtgtagagttatgaaatataaggggatgtaaatcaataattaagattgtacctggatgtttaaacattaacacaagaccttagtgtaagatttgaaattatttgaggcgagaatttagaactaagcaacaagagttgaacagtaggatcgaatagaagtaatatttttgagaaggagaattgtaag

SEQ ID NO: 482528 - DNA, 1000 bp, Homo Sapiens
tcaaaaatatctgtttattcatctgtttatttataagatggcacaatgaatagaaaatagtattttactgtagtgattgtatctcataaatataacaatataagacaatactatcacagaaggttaggtgcctgcaaatgaaattgtgctagtgaaatgtttttacctactgcataaagtagtaccattaactctaaatagattttaaagatgatttttatattcccagagcaattgctaaaataaaaacaaatattcaagaaattacatttataaaagaaatgtaattaaatactaaaaatatcaatcaatctaagataaggcaagacatctaaaataaaccaaaaataaatgggccaaaatagtaaaactggatattaagtctcaaaataacaacaattaaattaaatatatatggattaaatatgtcaattatgaaatagagattgtcacttgatttacaataaaacaagaccacctgtacactgtctacagaagatacattttaaaaataaagacattgaaagtaaaattgtgaaaaagtgctgaacataaaaagatgttagtagttacattaaaaaccagtcaaaatagatacccaggttagaacggtcagcagaaatgaaaacaaacatttcaaaatgataaaagtactaattcacaagacatggtaatacatatattttcatatactagcaaagcttcttaatacatggaacaaatactaacaggtaagcaaatgaatatatatttttagacagtattaattcaactcatttgactggggggaaatgagaaggaaaagctgggcaatttcaagttgaatgatatattaatgaaaatattcttattttgccagagcaagaatgacttggtgtacataatttgaaagtaattgagcaatatacaatctgattaaattttgacatatccaacgattgaaaacttcaattccagttgaacggcattagaacttgttcaaagatttttattgcagcac

SEQ ID NO: 482529 - DNA, 1000 bp, Homo Sapiens; identical to SEQ ID NO: 309075

SEQ ID NO: 482530 - DNA, 1000 bp, Homo Sapiens
tgtccgcatcgtcattgaggtggccaggggtgctgaagagctcctccaggcccagggtggctgggctcttctgcgggggtccagccatgcccacatctgcccagacctccaggacattctctgtgtatatgtcctccaggcagagcgtctctgctccatcataggtactgaggaagcgagactgagcagacaccgtggtcctcagcttggccatatacttcttgcatgtggcagcttccaaaggcagggccaatgggactggtaattcctgaacatgttgtagaaggaaggcagccaatccattcgctttcaccgtggcaagatcaagcagccttcttgccctctgcgacggtgtgaagatcggcaacctgatttcatcacattcatactggctgacgaaaccccgctcccatgccaggtccagcatgttctccacatggctgtggagcctcctgacaatggctggccggtgactctgcaggtctcgggctgggtggagcgagtgggggtcccagcagccatgcagcttgggggactggctgtcggcctgggcttcttgggcagccgcgatgagcttctgacaggcccaagtacccttattccagacggtgtccagaaggcgcctggccaagtgggagagaggctggcccaggaggtggaagccctcgtagtcctcccaggagaggacctcccaggacagcagccagtccaggacactctcgaagccttccagggaccctgagaccagcagctcgaccagctggctcctctgtgcctgaaaagcctcctgcgagcacatttcacaacctctttcctgatggttgtttatgtgtctctctccctgcctgggccacgtgggagcctgggtcttactcgtcctggcatccctgagcctggcacagcattgtcccccacaaagacactgagggaatgttcatgaatcaaatatcccctgggctgggggtggggggaacactctgtatccgtcctcatacggtag

SEQ ID NO: 482531 - DNA, 1000 bp, Homo Sapiens
ttttttttttttttttttacaaggtcttactgtcacccaggctggagtacagtggcaggaacacagctcactgcagccttgacctcctgggctcaggtgattctcccacctcagcctcccgagtagctggaactacaggttcctggctaatttttaaattttttgtagagaagaaggtctcaagaaggtctcactatgttgcccagactgctctcaaactctggggctcaagctatctggcacaccttggcctcccaaagtgttgggattacaggtgtgagccactgtgcctggccaaatttaactttttttttttttgagacagagtcttgctctgtcgcccaggctggagtgcagtggcaagatcttggctcattgcaagctccgcctcccgggttcacgccattctcctgcctcagcctcccgagtacctgggactacaggggcccgcccccacgcccggctaatttttttttttcctgtatttttagtagagatagtgtttcaccttgttagccaggatggtctcgatctcctgaccttatgatccgcccacctcggccttccaaagtgctgggattacaggcgtgagccaccgcgcccggcgagggttggggttttgaaggaccattatggaatagaaagaagggagagactgtttctagatcattaaggaagatttaccaaaaaagtttggcacgagggacagcctgggagaagagtgatctggtgtgacaggaaaggtgagaatggaaggagacaggcagagaaggctcagacttgaagttgactgagtgagaccggtgaggagagcagaggggaagccgaggaggacatgggcttggggaggagacttgcatttagggaagagtggagggcatgaaggaaggaggggacagagcaggtcggtaggaggctctggaagaggagtcagggaggccccagaaatgatccatttaccgcttattcggatgggcccgaatgctatccagctgccgcc

SEQ ID NO: 482532 - DNA, 1000 bp, Homo Sapiens
ttttttttttttttttttttgattcaccggttttattaaacttcccataaccatgtctgaccccctgggaattccagaattccaggccaagtcctccgtcccccaaaaaacagttttctggaggcactggacaaactcctaaagggctgactccagtgggggaagccttcggagactgcagcccatccagaaaggaccactgtctccaggccaccggtcccgggcctgttccagagccgccagtagggctggtcactagggtcagcttcgtttcgcctgggctctccccatcaatcctgtcctgtgagtttgcagaagggatggggaggcgaggccaggccgcagagtgagcgtcattctccgcagcaagggttctccaaggaccgcgctcggccgacgcttccacattctgtggaagagattctcgctcggtttccacacagctttgaactctgcccttcactcacggcgagtgggtggccaggcccgacgggtcggtgtgtgactcggcggcgcgcacgccagagaattcccgtggggaggacaccgggcggccacgcgctccccgccccgtcccgcccgcgcacctgtcctgggcgtgttgcccgagaccccgcctcgccctcagttccgcccccgtggccccgccccactcgcgccgggcgctggttggcggaggcggcgcgctatgctaatgagcctgaccccttcaagcgccggcggacgcagcagtccggacccaggcgcgccctccccgccccagcccaccccggcctgccgcccgggaggggaacatgccgcgctccttcctggtgaaaacgcactccagccacagggtccccaactaccggcggctggagacgcagagaggtactgactacccgatccccgagcccctgccgggactcgaccctgcggggcgggagagagagagaggcccctgggagcgggggctggggagacacctgtcccaggtgggaggagaaggagccagcgcctc

SEQ ID NO: 482533 - DNA, 1000 bp, Homo Sapiens
tttttttttttttttttttttttttttttttttttttgagatggagtctggctgtgcagcccaggctgaagtgcaatggcatgacctcagctcactgcaacctctgcctccttagtagctggtgttacagatgcatgccaccatgcatggctaatttttgtatttttagtagatacggggtttcaccatgttggccaggctgttcttgaactcctgaactcaagtgatctgcccacgttgacctcccaaagtgctgggattacaggcgtgagccaccatgccctccctggttacagagtttctgtttgagatactaaagtttcagaaatagtggtattgcttgtactacattgtgaatagtaattaataccattgaattgtatactttttttttttttttttttgagatggagtctcggagtctcgctctgttgcccaggctggagtgcagtggcgcaatctcggctcactgcaagctccgcctctcgggttcacaccattctcctgcctcagcctcctgagtacctgggactacaggcgcccaccaccacgcacggctcattttttgtatttttagtagagatggggtttcaccgtgttagccaggatggtctcgatctcctgacctcgtgatccgcccacctcggcgtcccaaagtgctgggattacaggcgtgagccaccgtgcctggctgaattgtatacttaacgatggttataagagcaaatcaggttaaaatatacataaacatacataaaaatatatataaatcataacatataatagtgaacttttttttttttgagacaggatagggatgtggccaatgttggagtgtagtggaagtaggtgtgcttagtagaaactttagctcaccggctcaagcgattctcgcatctcaaccatctgagtggctcaggctaataagaacatgggaccacgggtggctaatatcattcacgggtatttttttgtatagatagggtatagggaggttgcc

SEQ ID NO: 482534 - DNA, 237 bp, Homo Sapiens
gaatagggcactcaggctgctgtcataggactggcagtaataatcagcctcatcctcagcctggagcccagtgatggccagggaggctgaggtgccagacttggagccagagaatcggtcagggacccctgagggccgattgctgttaccatagatgaggagtttgggggccgttcctggaagctgttggtaccagtgtacatcataacctgccccgatgttggagctgctcccagt

SEQ ID NO: 482535 - DNA, 1000 bp, Homo Sapiens; identical to SEQ ID NO: 309076

SEQ ID NO: 482536 - DNA, 1000 bp, Homo Sapiens
aaacctggctcagaagatggtgccctcccctcacatattcccagactggaaggggcatcttacttctgagctccccacagccccagcctcctggctgtctctcctggctgctgaaataaaggccaagcccttttatcacctttgttatgtgaccctgcctgctggttgggcctcatctctcgcccctagttctttgctttcagggccacaccagccctcttgactgttcttgaatccatcatgattctttctaccccagggaccttgcactagccagcatcttgctgcgcttcctcccgtctcaattggctaatgtgggagaggcattttctttacacacccagagaaaatagagcctgctaccttccaagactgagagggttggaagaaactttttgtattgtagcttgagggtgggaaggagaagacacaatttgagcataagaaggtgagctggaagctgggcacggtggcttatgcctgcaatcccagtgttaggaatgcttgttctccactgctgcaaagaaatagcactcaaacataaatttaattttctcagcaagcaatttttagtttctgtagaaagggtgctcctcatagatggaacaatggtgagagcacagttgaacaagggaggggaaggggttcttattcctgacccaggtaatccctgctgctatgttgttcccctgttggctaaggttggaccgcacggtctaagctaattccgattggctattttaaagagagcagaggtatgagccagagtggcgaggtgagtagtttggcaggaaggacagttaggaacgggtaactaaaggtgacttacatcagagcaggtgaccaggggtgactcaggtcaaagcaggtgactgggatgagtcaggatggagcaagtgaccaggggaacaggtgtgaactactgaataaaactgatggaaaaggttgtttactgaaattagaagcaagggggcgaagagaaccaggaagttaaacttta

SEQ ID NO: 482537 - DNA, 1000 bp, Homo Sapiens
actcctagcgacttccagaagccgaagccgcctctaagtagaagaaattggtttgtcgactgcctgctgccttttaaaataaagtcacaaacttaaatgctttgtttccagcacgtggctgcgctgtctcaggtctctacgagcaacttccaagcctggacctcctgtaaaactgcagattctgactctgtaggtccaggaggggcgtgagaagccacattctaacaagctcccagggcagctgccgccactgccggtctaagcgccacactgaatagcgagaccttaaggcacttctggtctctgtgcttccagttcttccgagaaacttggcatcttgcagccgtttcggagagtccatgtgtgccagctctacccgctttgagagcagaacaagccaggaagctctgagagtgggactggaaggtaactgaataaaaccggtgacggggagttacgacgaagcaactaagggcactgctgttgccgacagaatccctcaccttgacatcgagctagggagatgtgttcaaaaccaggggaagactctcaggaacatgaggggagaagccgagatttgtaatccccgtggctgacttcactttagttctgatcaatagctaacacattgcgcggcttatttatttcaatatgtatggaagggaggaagatcgaatgccttacacaagtaggtaggacagcatcaccattgctatcagccgacggccgtgggcctactgggtgcctaccgcttccttggctctccccaagattccgaactgtgggcctaatcccatcgaggaggagcaggcagaggcactcaacagatgggggaaaattgcaaatatttatttgtgaagatttatttctctaccttccactcccggggcacaataccagcagcagtctggccctgtgtcaccaggacggaagaagtcccatctgcctggttcctttcccaggtgccacatggggtatggggccttccctgtcaccctct

SEQ ID NO: 482538 - DNA, 1000 bp, Homo Sapiens
ctaaggtcctggagctccaggatggagctggaaaagacactggccaccaacacttcctttgcagtgaggaagtacagctatgcaggacaagggaacatggagaatcagtgggagtccagggtcctgaagcccaggctccggctcttggcgctacacagggactcttgcagatggctcccagaggtactgagggcctggttgggccattcagtgcctcacgactttctgtcaaaagagaggtgagcaactatggtgaagagggatggcttcagtggctccaggtggatgctaatttctcattccccaagttacatgtgccctgaagacagcccaaggagtgagagtgggagaagagacttcagcctgacgagtcccaggtggatgggatggaggatagcagtgtgtgtgtgcacctgtgtgcttgtgcacgtggccctgtaccagcgtgcgtgaagcactgtacttatgacggtaccaactgcttatgataaggtggaaacccccaggacccaagtcagacgggctgggttccagtcttgattcttcactatctttcagtattcttcactacttgattcttgaccgagtaatcttgggcaaggccttccattctctgggcctcagtttccccacctgtaaagtggaagtattgcctggatctctggtgttctatgattttaggtggtagtgccttagaatgcctgtgtaaatggctacatggggcagggcgggggcatctgcagtggataaggacagctgaggggagttttgcagggacaagagacagggctgactagctcagcagagcagagtctgaactcagagctggcttctgtgagctgggagaactttctgacccacagtctactgccacagcattagccttggtccctgagggactagagggagcttggttccggctcttttcagacttcccacctgaggttgtgtaaacagctccacctgagtcccgttgatggcagatggatggcatcatccc

SEQ ID NO: 482539 - DNA, 1000 bp, Homo Sapiens; identical to SEQ ID NO: 309077

SEQ ID NO: 482540 - DNA, 1000 bp, Homo Sapiens; identical to SEQ ID NO: 120031

SEQ ID NO: 482541 - DNA, 1000 bp, Homo Sapiens
tggcacatttgcccccagaattggggcctggaacactggacctgctccttctcccttctccttccccgtttttgtgcttctggtttgtttctttaattaatttaacaagtgctgcagtttgccctcccattcccatctatcccccaagtcctttgcaatttcttccctgccctacataggggcggtgggtgtgggatcccttcactggccccctcgggaggcctgggttggactcagggtctcctccagctgggggctggaccgcagcacctatctgagcagttagagcgtctttcttttcagattgtgtacagtagattatttattttgttattttggaataaaatttattttatggcttaggatctatgacccctgccttgagagggagaatgggataggggagtgaagggaagctggcggtggatggggcaacagaaaagatgcagcaggcagggccctctcatacactggagggccacatggccaggcctggacccagactctcaccctggctcccaggcagcattggaggtgtggagccatacgtagatgtcacagccacttggacccacttgggcacagtcagactccaaattcagagtatttgggggttagcatatgtcagagaggccagcacacttgctgctgtcttctgtgcagtgtctcaccctcccaaatttgtgttgtcacgtaggcaaaagcagatagacacatgttctatgtggtcatgcaactaaggtgccagctatatatttaacatatcctaggtacatacacgttcacacagctatacacgaagaatctcagcccttgtacttttgcatagtctcatacacgtatcagaagcctccacctggctaacaggaatttggggctttgggagattttttaatcagggcaaaacctgtactagtaaccacatgtccagactcctcctatgctcccacccagggtcccttcagctgcttcccattcccctagggctgagacccaatat

SEQ ID NO: 482542 - DNA, 1000 bp, Homo Sapiens; identical to SEQ ID NO: 309079

SEQ ID NO: 482543 - DNA, 1000 bp, Homo Sapiens; identical to SEQ ID NO: 335107

SEQ ID NO: 482544 - DNA, 1000 bp, Homo Sapiens; identical to SEQ ID NO: 309081
  misc_feature (233)..(233): n is a, c, g, or t
  misc_feature (667)..(667): n is a, c, g, or t

SEQ ID NO: 482545 - DNA, 1000 bp, Homo Sapiens; identical to SEQ ID NO: 309082
  misc_feature (116)..(116): n is a, c, g, or t
  misc_feature (144)..(144): n is a, c, g, or t
  misc_feature (156)..(156): n is a, c, g, or t
  misc_feature (165)..(165): n is a, c, g, or t
  misc_feature (174)..(174): n is a, c, g, or t
  misc_feature (241)..(241): n is a, c, g, or t
  misc_feature (257)..(257): n is a, c, g, or t
  misc_feature (283)..(283): n is a, c, g, or t
  misc_feature (340)..(340): n is a, c, g, or t
  misc_feature (422)..(422): n is a, c, g, or t
  misc_feature (494)..(494): n is a, c, g, or t
  misc_feature (498)..(498): n is a, c, g, or t
  misc_feature (519)..(519): n is a, c, g, or t
  misc_feature (522)..(523): n is a, c, g, or t
  misc_feature (527)..(527): n is a, c, g, or t
  misc_feature (601)..(601): n is a, c, g, or t
  misc_feature (771)..(771): n is a, c, g, or t
  misc_feature (779)..(779): n is a, c, g, or t

SEQ ID NO: 482546 - DNA, 1000 bp, Homo Sapiens
  misc_feature (52)..(52): n is a, c, g, or t
  misc_feature (207)..(207): n is a, c, g, or t
  misc_feature (298)..(298): n is a, c, g, or t
  misc_feature (365)..(365): n is a, c, g, or t
  misc_feature (385)..(385): n is a, c, g, or t
  misc_feature (394)..(394): n is a, c, g, or t
  misc_feature (478)..(478): n is a, c, g, or t
  misc_feature (521)..(521): n is a, c, g, or t
aagcttttggtgtttttgtaaaactactgattatatattcaaatttggcttngtatattatttccaagcccagtttccttcttgtcttcttccaaattacatcctcatgctatggtggtgcatttattcgtgagtacaaattaagactcattaaaatttgtttagctacctacagatagagaactgcttattattactgttattatntaaaaccatgaccaccgggaaaaatatcaatatgaagagagaagttctataacaatttcaacagtttctaagccaaatatgctttctgatntattaattccttatcctcaccattttttttccttcattatcttcatgcgggattttaactaaaaatnggtataaaatttgttatatnggcatagtncgaaaagcaatcactgtgtacctactctctctcaggaacagtggaagatgcttgcgatacaaagataaacaagcccctatacgnagaacaagaatgttccagatggattcaatgtggaaggacattntaggcagggggaacagcaaatgcaaatccatgtgtcctggaatgagccagacatgcttcaggttccatggagtttttttttttttttttttttttggattaaaaaatttggtgacttttcaaagtttgacaacctcaggattaaacaatttatcgagcccctctgccatctcactctccatgagggcagtccaggttgagactcagatacaaatcacctttattgagttctgctgggatggacaggtcacttcatgtatacgtagatcctctccttaattctatttaaatcacttaggtgactatcaccatctcccatcagggttcggtgacctgcccacagcctcccaagtagaaaatgatccagggagcatgtgagttaatgatacatcacatctggagccaggcaggcatttcatgggtgggggatgaagatcttccctccaatttcagaagtctgaccttgcaggttctgaagta

SEQ ID NO: 482547 - DNA, 1000 bp, Homo Sapiens
ctaattctttcccagttttgtcacctcattgctgagttttctaattataatttgtgatgctcttttacattttatattgttttcttagtgttttctaactcattttgaaacagtaggttactgtgtagcaggatgagccacagacaaaacccctcagacaccgagatagtgaagggagtggctttaatcagctgggagcatcagcagcctagcgtcttaaaatccgagctcctcaggtgctcaacttctgtcccttttaagggctaacaaccctaagggggtccacatgagagggtcgtgattgattgagcaagccagggggtatgtgacggggctgtgagcaccgatggacagagtgaaacagaatagaacgggaggtttcacaaggtccttccatacaatgtctggaatctatagataacaacagttgctaggtcaggggtggaatttttactaccaggcttaggtcaggcaggcccaggcctggtttcagatctggttccttggtttcaggtctggttcctaggtgctgggctacctgccttctgtttctcttctctttccttttctgagtataaaacaacatgagagggtctctctcgtccctcatttccccccttcgagactctcactttttattagttggagttctcactcttatttttgctacttacatcttcttgtgcaatagattgatagtgattcatatagtacacttgtgctgaagcattttggtgaatcaaggtagtgatgaagctttttatcatttgaagaagtacaggtagcaaacaagggagcagtaagcaggttcctattactattataactcttattataagagttttaaattttcttagtgctgggaaccaccttctaaacatggcttcagggtcgaatccatgttacacttgtacaggcacatgtgccagttttgtcatatttttaactatgtctttaactacttgcctttgattatctatgtgtagacagtaactagtaa

SEQ ID NO: 482548 - DNA, 1000 bp, Homo Sapiens
ccagccacctagccattgaagccaggaatctgagagtgatcccagatttattctcttcttccattatctcattactttcagctttgtttctataataaataatctttttttgttgttgtttttgtttgttttgcttttttcagatatgaggtcttgcaatgtttccaaggctggagtgcagtagctattcacaggtgtgatcataacacactacagccttgaactcctgggctcaagctttccacccgactcagcctggcaagtagctaagactacaggtgcacttcattgccccctgctacgtttttgtgtttttataaaacttcaaatctatgttgagtttcccttcttagcttcagatgttctttacatcccacctggaatagctcaattgcttctaagcctatcttctgacctttggcttggctaaaatccctccccagcactgtggtctgatgacctatctggaatgcaaatctgatcaagtttgtaccctgatttcccattgctttccatggcctacagtgtgaccctgccctcaccacccagcttccttagatcctcttttgacttcacaggttgatactgaatgattttctgtattttctctttcaggtcatattgtttggtgattttgtaattttgcttatgcctataacaatctcgtttccataactcctattcatccttcaaaaaagtttcaggtagcatctctccaggaagccctccctgactcattcaggctgagctaggtgatagcttcctgggagctatcctagggattcctgctgcacacctcagccagttatttactgcactgcattgagaaaacataccacctcctgctaactaggtggtaaatgtcttgaaggcagagcttttctgtcttacactatacttgaatcacctgcaataaatatttagtgaactaggatgaggctcaacactagttgcatataggaaatatctagggatcttttaaaaatgttaataccaacaa

SEQ ID NO: 482549 - DNA, 1000 bp, Homo Sapiens; identical to SEQ ID NO: 309083

SEQ ID NO: 482550 - DNA, 1000 bp, Homo Sapiens
agttctggtgaatttcaatgtaaatgtagtcataaatactcatagaggaattgggctgaagtgacttagtggttaaaagcttgggcactgccaccagacagacctggccaaatcctgattttgccatttgtgtgatcttggacaaatgacttaacttctctgaatttttagttccacatccatgaaatgggagcaaaaatatcaatatcacagagctggtttgaacatttaatgagatgagatgtggaaaactccgaacaaggaagtatgcagtaagtgctccagaaatgcaagctgttattggttttttgttttgttttgttttgttttgttttgttttgtttgtgttttgtgtgtgtgtttgtttgagatagtgtctctctctgtcactcaggctggagtgcagtggcgtgatcacagctcactgcagcctccaactcctgggctcaggggatccttccacttcagcctccctagtagcttgaaacagggtctcactctttcacccaggctggagtgcagtggtgtgatcatagctcactgcagcctcaaactcccgggatcaagagatcctcctgcctcagcctcttgagtagctacgatcataggcgcgtgccgccatgctcggcttgttaatgtttattatatttcatgactacagtgtcaaaattagcctgtagagtgtggtgaagtcttttatttagaaaagaaagtcgtggccgtgtgcggtggctcacgcctgtaatcccagcactttgggaggccgaggcgggcggatcacgaggtcaggagatcgagaccatcctggctaacacggtgaaaccccgtctctactgaaaatacaaaaaattagctgggcgtggtggcaggagcctgtaaacccagctactcgggaagctgaggcaggagaatggcgtgaacctgggaggcagagcttgcagtgagccgagattgcagcactgcactccagcctgggcgacagagcgagactccatctcaa

SEQ ID NO: 482551 - DNA, 1000 bp, Homo Sapiens; identical to SEQ ID NO: 309084

SEQ ID NO: 482552 - DNA, 1000 bp, Homo Sapiens; identical to SEQ ID NO: 309085

SEQ ID NO: 482553 - DNA, 1000 bp, Homo Sapiens
actgtgcatgggaaggtacatatatattataatgaatatttctatatgtaacttctatttcatatatgcagatgcataatttttggtttgttttctcaatatttaaagtgggcagagctccattctggatgtaggtaaaacttacgtgttctaaatatcataattttattctccactacttttaatttcttcaggtttttctatagctaaacaaaagacataatttgcttgtattcatcttctttattaattgaacacacttattgtaaatggaattggcactttcaatcaccctcattatatttactaggatgaaattaataacccaaagattcagtgttttcccatactaggttctgtttcacatttgagcttatttggacaaatactacttccctgcacactgaaaggatctataaaatattgctccttgatctctgcataagaagcaatttgttggactccagtgttggagagcaatacttcagggttgatgcttgggaatgtgtaaatcttgcctatggatttagatgtctgttcaacaagattgcaccacaaaagcctcacacctttattatgtttcacacgttacattgcactgacaagtttaactgcatccacgactgggccagctgatgtttaaattctcaaataccttaacatttgaatgtctcaggcaagaaacctgactattcagaaggcacaagctgtaatatttcaggcaagtcaaaatcagaagtgaaggcttttggccatagattttactagtgcatttatattaacctctatgcatttccataaggctttaaaaccatttcttaggcagtatttttctgtgggtcttcattaaagtatggatcttatttaatctacttggaaaaatcccttcaggatcccaggagctgtcctcctccattccttttaaaagcactttctcttctgcctaaaaactcaagtactctcttaactaagtgcggactgaaatatttcactatggatt

SEQ ID NO: 482554 - DNA, 1000 bp, Homo Sapiens; identical to SEQ ID NO: 309088

SEQ ID NO: 482555 - DNA, 1000 bp, Homo Sapiens; identical to SEQ ID NO: 120032

SEQ ID NO: 482556 - DNA, 1000 bp, Homo Sapiens
ctggttcagagaaatgatgggcaagttgtaccctttctcctataaagcaaaatttcaatgtaagtccaaataagtaaggcatgtgcaaagaaaaaaatcattttggaatcaaactgttctgtgggtttccttttcttaatcatattttgagagttgttggtcaactttcaacatctagctagtaacatttatgaggtaatatgtcagtcgtaccattagtaatttcagtatctacttttaatgacccaacaagtattcatggatgagaaataagcaaattgtctcataactgagggggaaggaatgagaaagtattggaagaatcacttattgacttccacaagaagcaatgtatttttaaaaaatttaaaaataaggagaagaaaggaggcatatggaaccattactccacacagatgccagtcccatgcaaagagggatcatgcggctatcaattttctgatttatgccatagccactgtatgaatctaaactgttactgtgtctcatttgagcttttgccaatagtctctctggattctatgtcagtagcaattgatagtatggttgccttactgttccacctgtgctaaccttccctctcagtccacatcctacttttgtctctgtctccacttgccattttatgtcatgaagctctcttactaccgaagccacacaattttctagagtttaattattacaaattacttagtatatactatgctgtttgatgattgaggattcaggtatattttttcattctttaggctttacgtacaaaggttaattggggcttgccttctctttcttggtcacagttaatagttgtgggtgctatatgggctttggagtaaaagagatgggttttctgtcacgaaagcttgagaactgtcatgagttacagctcgtgtaaacagagttcatcacaacaatgactccagagcaactatttaaaactaagaacataccggtttcctcttctggagggtaaacagtt

SEQ ID NO: 482557 - DNA, 1000 bp, Homo Sapiens
gcaggttgtacgggtttattgttccaataccacaagagacatacagaagcagtgctttctctgggcagcctcatggaccagatcagtgtcaaactgtacccttgagtgtccccaaaggttccagcagagggaagaagaggactggacatgtttgggcccctgttcccggtctttggtaaacagacgcttaagttgacaacttggacttggccaatactgcattctaaatcaccacatcattcccaacttgtcactcatgcttcagatgacgaaaatgccacatcagattaaatgagaaaaaaacctttcagataaaatgagacttgaagtcatacaaattttatacttgatctaaattaagcaagaaccctcaactctgtaataagtcgaaatacaagatataaggcaggaaacaaggcaagggaaaacacacacaggggcatctacttgctggaaacatgttgggagagaggcaggagcaggcatggctttgtttcttcccaaacctgcctgatgtcaaaagtacgtcaaaaggagcctcacagtcccaggagagcatggtcccaggtattgctgtgacaggtggtgaccctggagccagatctggaaggccttcctgggggctgcccagggaactcacccatgaatccagaagcacttaacactggtggtggtgatttgtcacatatggcagcaagcagccattaaggctgtaggaggagagatgtgaaaagcaagatgcgtttgctcggtggcatgtgggcaggctgactgtggctctgcaggctgcagcaggtccagccggtgacccaacagggcatcgggcaacctggcaggtcacaagtcaatcatttcaccctcacgtcgagcagcacagcactcagtggctctgacaacagatgtagagaaggagattacaccactttaatgcaatgatgctgaagatgtaaaattaggaagagacgttcatgttctctgtacaatacatccatttacagaa

SEQ ID NO: 482558 - DNA, 1000 bp, Homo Sapiens; identical to SEQ ID NO: 309090

SEQ ID NO: 482559 - DNA, 1000 bp, Homo Sapiens; identical to SEQ ID NO: 309091

SEQ ID NO: 482560 - DNA, 1000 bp, Homo Sapiens
cagactctctgatgttgagtaagatatgagcacatattaatggcttttccacattctttgtgtatatacctttttccaagtaaaaattctttcctgtgcaataaggtatgagcattaattaaaagttttgccacattcttcacacttgtagaagtttactccaatgtaaattatcttacctacaatcaagtgtgacaaccatgtaaagcctttatcacattctttacatttctagaatttctcaccagtataatttattttatgtttgaaaaagtttgaggtgttgtcaaaatcactgtcacatcttcaggtttgtagagtttctctccagtatgaattttgttatgtgtagtaaggtttgaatattggttgaaagctttgccacattctttacatttgtagggttgctctttagtatgaattctcttatgtgtattaaggtgtgaggaatagttaaatgctttgccacattcttcacatttgtagggttgctctccagtatgaattttcttatgttcaataaggtttgagggtcggttaaaagctttgccacatttttcacatttgtagggtttctctccagtatgaataatcttatgtgtagaaagggttgaggacagtttaaaagctttgccacattcttcacatttgtagggtttctctccagtatgaattatcttatgtttagtaagggttgaggaccacttaaaggctttgccacattcttcacatttgtagggtttctcctcagtgtgaattatcttatgtttagtaagagttgagaactggttaaaagctttgccacattcttcacatttgtagggttttcctccagtatgaatttttttatgtgtagtaaggtttgaagattgggtaaaagctttgccacattcttcacatttgtagaatttctctccagtatgaattttcttatgtgtagtaaggtttgaggattgggtaaaagctttgccacattcttcacacttgtagggtttctctc

SEQ ID NO: 482561 - DNA, 1000 bp, Homo Sapiens
agggggatccagtttagctttctacatatggctagccagttttcccagcaccatttattaaatagggaatctttcccattgcttgtttttgtcaggtttgtcaaagatcagatggttgtagatatgcggcattatttctgaggtctctgttcaaggtgaacagattcttattggacttttctaacaactatatcatcgtgaaaataagagtgttcagtaaggatttcaaaattctggaaaaatcaggcaggggaaaaaagataaatgcttcacttctgttttcaaaagtataatctactaaattgtatgttacagttaggttaagagaaagagatttcttaagtccagaaactagaacattaaagaaccagcaatgctccaaaaagctataaaattataatcaattttcatcagttcattcagtaccatgtaatcaattccagtcttgttgcatcttgggttagcagtgtcatgaacccatcaatttctgaagcagacttctggagatcttcactgagcgaagtgtatggtcttaaagttatttaaacaatatcatcagaagcctataaccagactatcttgcatactcttttctgtgtgtctcagagggaatcccgtgatggagatgaacattctgacctgtagctgattgcaggagctttcaggaaagcatcagggggaaataatatctaaatgataaagaatatgaaatggctgtgatgaaagacctgatgagagttcattataccacaactgacaaggatattcgattttttctgtgggatacaacatttatttatttatttatttatttagagacagagtctcgctctgttgcccatgctggagtgcagtggcgctatcttggctcactgcaagctctgcctccctggttcatgccattctcctgcctcagcctcctgagtagctgggagtacaggtgtccaccaccacgcctggctaattttttgtatttttagtagagatggggtttcaccat

SEQ ID NO: 482562 - DNA, 1000 bp, Homo Sapiens; identical to SEQ ID NO: 309092

SEQ ID NO: 482563 - DNA, 1000 bp, Homo Sapiens
ctttaagccaacagataaggtccattcatccacagttaaaaccccattcacagacaacacaaaacaaaacaaacaagaaaactaaaatatcagaaacacctagtccccctaaataaagtaaaaacagaacaaagaagaaaattcaaaacagaaaaacagtagcaacaaatctcaaacaaaaccatgaacctatgaccccttctctagttttctgtgcagcatctgccctttgtggttctgtgaacagccagggtttggaggcctgtgggagatgggtttgctgcactttgctgagctgacattactcagttgccttgactttgagttagtcattagaagtcagtctagaccaagaaaggcaagatgatatatgtcaagcattaataatacgtctcttccgtatatcttcaagaatgtagccacagtcagttcactcattgcatgtacttgtaactctttctccctgaagtttgtggcagcctctattgctggagaacttgggacaatttagggatgaatttaggttggggtagtgtctatacacatgggaggggtcatgcctcctctcactcgtcaaacgtacccatgtccagggtcagcgacagtttcctctgagatcatggacggatgcagttgggtggtagcagcaagagaatcactgtcttggtaacaaacaagagaaattgtgagtttctaatttattccctcttgagcctattttcagaaaaatgaaatcaaatgggcttcatggctttttcttgacttctttaccttcttttgacatggctggtcatgggacttcacacccgcaagactgtttctccccctctttctttctcatagccattttaatttaagtgatgatatgtatgttcacatttgtctggggacagtcctagtttttgctcattgtcccggagggattatatgtaagtttccctttcactttccaaactgactcagtttggatcataaattatctaggcacaccctgttacta

SEQ ID NO: 482564 - DNA, 1000 bp, Homo Sapiens; identical to SEQ ID NO: 309094

SEQ ID NO: 482565 - DNA, 1000 bp, Homo Sapiens
atctcctgacctcgtgatccgcccaccttggcctcccaaagtgctgggattacaggagtgagccactgcgcccggcctgattctatttttttaaaaactattataacaggattcttgaactgggtctgaactgagattcagtctcagaaaacattgctctccactttagggatttctagaatgtaaaagtcgaggtaaaatttgaggtcctgccagatggcccatggtggttgtaagcacagggtctataaacatccccaaacatggccataccacaaacgcacgggactgcaggagattgcaggctacccctctatacctcttcagggatgctgggacatctatgaaaagaaaaccagaacatattttctttctttctcattaagtgcattgtgtctccaagcattaagatttggctttctttgtaggtgtggcacatttgcttaccagctagaaaagcccaaaatatgcatgagatgacattctgatttggctctcagtttgaatgttgttgatgtatagaaatgctactcgttttcggacctggattttgtgtcctttactgaagctctttatcagttctatgagctttttgaaagagtcttcagaatttctaggttttatatcatcagtgaagagacataatctgacttctttttcccctatctggatggctttgtttatttcttagcatggacttccagtaccatgttgaattggggtggtaagagtgggcatccttgtcgtcttgttccaggtctcaaggggaatgatttcagcttttggtttcccagtatgatgttggctgtgcatttgtcatcgctttctcatagtattctgaggtatgttcctttgatgcctatcaacagtggactggattttaaaaatgtgattcaaataccccgtagaatactacacagtcatgaaaaaacaaaatcatgtccatggcagcaacacggaggcaactggaggccattatcctaagcaaattaacacagaa

SEQ ID NO: 482566 - DNA, 1000 bp, Homo Sapiens
ccatttcgaaacgatctcccaagtctatttatattagacattgctacagtttgattctcagctatgttaagtaataattatcatcggaaccaagaccattgaatactcctgcccttcatccttttttcaaagcaaacttgcacacactgtaattgttttaacaatgtttatttttttttttttttaacaattcagtcggttggatctcgatgcagtttattaaaaaaaaatcagtacattttcatataaactgcaatcaaaaaagtaatttactttgtcaaagaagttatgaagttgcaagttattttttgtaatatgcagaacagtaaaatgtaagcatgctcttggatgcaggtgctcctgtgcaccatggagttattttgaagagcctgctaacgtctgcaggcagtttataggatgcaattattttctccacaacttaggtacatgagaataaaactgatatttatgaataaagtatttttctcgaaaaagttgaggcagcttttgttgaatgctatctgtgtgggtacacttgctacaccttgaactgtactgagagagagacagacagcaagaagcccatgttcatgctgaaacctgaaaaatccctccatacgtgttgaggagttccaagaaaaagaagagggtaaaacactatacacaactgttcatcgtcttacattaacagaacacaccgagaaactttacataacaaggaagcaaatccccttcactgcttttagtcaaagtccgttgtatctatagtggaggatgaaagtggagcaagcctagtagggataaagcttaagtctacatctcatgcagagttgtccttggtctgtcctctaatatttctcagacatccgagttagaactgaggtttgttaatctggggtccgcattgatttcatatctgtaatgatacccttccatgtgatccctgcaggcatctctgatgttatgcatccacttttttatccccttgcggttcaaatac

SEQ ID NO: 482567 - DNA, 1000 bp, Homo Sapiens
gatcttatgaaggttgtggatgattaagggtggattacattttgggcttagttttccatgtgactgctaagtcacctttgaacaagtcttcaggaagacatgcagaagtcattagtgctgctgtctagatacttgcattctctcccatccaggggtatgagataatgttaccattttcagcagagtgacacgtgctccttccatcagttgctggtgaccctatgttatatatcaggggtttgtaaaggttttctggaaagggacagaaagtagatattttaagatttactggcaagacagtgtctgttgtaactaatcagcttgggtgtgtggtgtgaaagtagacagacaaccaggtaaacaaataggcatggctgtgttccaactttacttatcaaaacaggtagtatgctggatttggcccatgggccatagtttgccaactgctgctacatatcatttccttttgttctctaaaaaaagaagaagaaagaaagaaaaaaaaacaaaccaaaaccaaagccacagtgaagacaatagcagtatcagctctattagatggtgaggctgggacttatgaaagttatgagaggccaagctggatttgaacctgacttcgtagttccagaacagtacttggagccttgaatatgtatcaagaaggcacttgatacatattcaacgttcagtatttatttaagcttgatactcttttcatagcatcttcagttcttcaaacagaaatggatggtgtcaaatagaaactctgccaaagcgcaggccttgggtaggtttctgacaatttcccaagcttcccagtttaagctatgcagtgtgagctgtggggacccagccttatcattcaaaataccagattcaattttatgtgttgccactgatacttgtttaatcaaaaacattgatgatctgttttctcctgcaaactctgagtccactttgaatacagatatggcttttcttgttgagtgcagattcttat

SEQ ID NO: 482568 - DNA, 1000 bp, Homo Sapiens; identical to SEQ ID NO: 309096

SEQ ID NO: 482569 - DNA, 1000 bp, Homo Sapiens; identical to SEQ ID NO: 309097

SEQ ID NO: 482570 - DNA, 918 bp, Homo Sapiens
tttgcctgccttttcttcctcgagtgctcttccccagatatctgcatagctggtgccctcacctccttggaatctttgttcaaatgttatcttctcagtgagaccttatctatataagttttctatgattgctggaataaattagcacacctctagtagcctaaaagaacacacactctctctaggggagagagaacactttcttaccttctccagattttaaaggatgcctgcatcccttggcccctggcccccttccaggcagcaaccacatcattctgaccctagctgtcacgcttcttgcctcagactctcctacctccctcttttgcttttaagtcctcttgtgatgacattgggctaacatgggtaatccagaataatctcctcatctcatgatccataacttcatcacatccataagtcctttttgccatatagggatatggacatgtagaaaggccattcttctgcctattactccctccttgagcattctaactaccttcacatctacctgctcccagcattcctgagctctcttccaaacttaatttttctctgtgccacttattaccttctggcatattatatattttacatatttattttattaatgatctgtcttttctcactggaatataatttgcatgagggtaaacatttttgttttatatcgttgacatattttcattaagttgaacagtgcctttcttttagtaaggattcaagaaatatatatgttttggctgaataaattaggttgagaagtttgggggaaaatcctggcatgatacagaagacggttcccagtgatgggaaagggccatgtggtggggcctctacaggaagctgggatgctccagaggtcccccagggcagagctgctttgcttacgttgaactctttgcccgagct

SEQ ID NO: 482571 - DNA, 1000 bp, Homo Sapiens
aggcagaagaattgcttgaacccgagaggtggaggttgcagtgagctgagatcgtgccaagtgtgccactgtgctctagcctgggctacagagtgatacttcatctcaaaaaaaaaaagaaaagatattatactttggacaggagctgtgttcccatctgggacttcctggagaagatacagtacaaaatagttacaggtactcaccaggttttcatcagaaatgagggagctctaattgtaggaatttcttcagaatacatttccaaagcaaatggaaaagaaaaggagtccagaaatgctgattactcgttgtacattaaatctttataactgcgtcaagattattcaccttgatatcctatacactaaccccaggagtttaggtcttattcccagggtcttatgggatgtgctggggtttctggaagcctggctaattgctattatagcaagtctatagtcactcactaggagacttatttgctgcatatttagagatgtgatatattctgaatgtgaaacaaaaggattcataaatctctgagcctcgcaaggacccatgagaaaaaaagcatttattcatatcaaatatataagcaaattaatatataagctggaaaggtagcacttcaaatcttatgtcagacattcttcacaactgaaagaattcctagtgatttgtaatttttctgcatatactttataaaaaatctgtagtccagaccctcacctcagccattgaacagatagtgtcttgcaggtctaaaacacatgtcattttctgtttttagactacatcattgtatttggtttagatgaggccacgttgtgatacaaacaagccagaaatttcagacgtttgacacaaacatttatatatacagaaaaatgagaaggtggtagggagttaggtaattttgttttaaatgaaaaagggacagaaggaaagctatataaatggttggagtgtatagacaaagtagaagaaaaatatgtgg

SEQ ID NO: 482572 - DNA, 1000 bp, Homo Sapiens; identical to SEQ ID NO: 309098

SEQ ID NO: 482573 - DNA, 1000 bp, Homo Sapiens; identical to SEQ ID NO: 309099

SEQ ID NO: 482574 - DNA, 184 bp, Homo Sapiens
aagcccaagtggcattcttaatttgatctttttaaaatgcttaacaaaaactgaaagtgtttaaatctcattttatcttgctatttggacagagtcaagggccagtctcccccttacacacacacacacacacacacacacacacacacacacaccgtcaaaggccagtctcccccttacacac

SEQ ID NO: 482575 - DNA, 212 bp, Homo Sapiens
tcttctctagttggctatttcattcatttttatttctcttgtgtaatatatatatatatatacacatacatacatatatatacatatatacatatacatacatacatatatatacatgtatgtgtatatatatatacacacatatatatatctcataccactttgggaggccgaggtgggcaggttgcttaagctcaggagttcgagaccag

SEQ ID NO: 482576 - DNA, 1000 bp, Homo Sapiens; identical to SEQ ID NO: 309100

SEQ ID NO: 482577 - DNA, 1000 bp, Homo Sapiens; identical to SEQ ID NO: 309102

SEQ ID NO: 482578 - DNA, 1000 bp, Homo Sapiens
gatcccctgtgctgtgtccttcctcggcagaacttggggagtgtctcttggaaggtgattttttttaacggaggtaaaaccacccagccccctgggcatgcgtgtccttcttttcccccacagctgatgctcggtatgaaactgacagcatggcctgagcgccaccctgaaatgccatgctgctttctggatatgaaactggtagagaaacaagccactggacgatgtctacacagtccttccattccccctgttccttcctatatttagaaaacactcattaagtgcctaccaagtgccaggtatcacgctgagtgccagcgcagagcagaggcattcaagtccagaggagagatgctcaccgatgtgcgtgtccgtatgtgtaaccatgtatgttctcactgcttcctgtaagcaagtgcctttgttgcagcagtcggggtggaaggaccttccgactttatgctgtggctgccttgctgtggtgcggctgtctctgggatgggctgtggccagttgtgataccttggtggtctggcatgtgtgtcagagactgctggtactaagatgtccttggtccgtgctgggtatcacttgctggcatggagacttttccatgccaatactaggggcggggggagtcttgagttagcttttgcagtagcaccgtgcccaaggtattcttttggagatgcccttctcttatcacatgccttacttgggacagatgggttttcagttcagtgacccccacctggagtcccagatacctctatccacacaagtacctcctcctctggtgcctttgtattcattcatccaggtggcaccccaggcattaggacaccggctgaatccccaaattgccttgcacagaagagccccatcctgagcctatggtccccctggtgcacacagagcagccccctccaggtttgggcaaggataatggaagttgcgaatttacctctgacatatttgaccccagtgtctcagcccc

SEQ ID NO: 482579 - DNA, 1000 bp, Homo Sapiens; identical to SEQ ID NO: 309103

SEQ ID NO: 482580 - DNA, 1000 bp, Homo Sapiens; identical to SEQ ID NO: 309104

SEQ ID NO: 482581 - DNA, 1000 bp, Homo Sapiens; identical to SEQ ID NO: 309105

SEQ ID NO: 482582 - DNA, 1000 bp, Homo Sapiens; identical to SEQ ID NO: 309106

SEQ ID NO: 482583 - DNA, 1000 bp, Homo Sapiens
gatctgcctgcctcggcctcctaaagtgttgggattacaggcgtgagccaccgcgcccagcctggcttttacatttttaaacggttttaaaaaatcaaaagaaagtaatatttaggtagacataaaaattatatggaactcaaatttcagtgtccatgtataggattttgttggaagccagtcacatccattgatttccatactgagtgtggctactcttaccccacagggcagcattacaagaactcttcaaagatttcctatgtggtcccttacagaaagagacctagaatgaggctctaacacacactaggtgctcaatcgatgtgtttggaatgatgggaaaggaattaaaaagcctggtctgggaagagtggctcatgcctgtaatcccaatactttgggaggccaaggcaggaggactgcttgaggccaggagtttgagaccagcctgggcagcatagcaagacccccacgtacacaccctacaaaagtaaaaataaaatttgctgggcacggtggctcacgcctgtcatcccagcactttgggaggccaaggcaggcagatgacctgaggtcaggagttcaagaccagcctggccaacatggtgaaaccccgtctctactaaaaatacaaaaattagccgggcatggtggcttgcacctatattctcagctactccggaggcggaggcaggagaatcgcttgaacccaggaggtggaggttgcagtgagccgagatcacaccaggaggtggaagttgcagtgagctgagatcgcaccactgcactccagcctgggcgacacagtgagactccacctcaaaaaataaaataaaataatgaaataaaattagccgggcatggtagcgtgtgcctgtagtcccagctattcaggaggccaaggtgggaggatcacttgagcccaagaagtcaatgctgcagtgagccatgattgcaccactgcactccagcctgggtaacagaataagaccctgtc

SEQ ID NO: 482584 - DNA, 1000 bp, Homo Sapiens
gatccgtttccacgatcactcacggggttgttggctggattcatttatttcttcctttttttttttttttttgagacggtgtctcgctctgtcaccaggctggagtacaatggcatgatctaagctcactgcaagctccgcctcccgggttcatgccattctcctgcctcagcctcccaagtagctgggactacaggcgcccgccaccttgcctggctaattttttatatttttagtagaatggggttttaccatgttagccaggatggtccctatctcctgacctcatgatccgcccacctcaccctcccaaagtgctgggattacaggcgtgagccaccatgcccggccctcatttccttcttagctggaggctgccgtcagttctctgccacatgggtcccttcatagggcatctcacagcatggcagctggcttctccagaggcagctagaggttgcacaaaggtgcccaggatggaagccagtctttttcttttttttgagacggagtctcactttgtcacccaggctagagagcaatggtgcaatcttggctcactgcaacctccacctcctgggttcaagccattctcccgcctcagcctcccaagtagctgggattacaggcacccaccaccatgcccggctaatttttgtatttttagtagagatggggtttcaccatgtttcccaggctggtcttgaactcctgacctcaggtgatctgcccgcctcagcctctcaaagtgctgggattacaggcgtgagccaccacgcccagcctctttttcttttttaattttttttgagatatggtctcatatttaccgaggctggaaggcagttggtgtagccacagcctctgcttcctgggctcaagagatcctcctgccccagctttcctagtagctgagactactggcatgtgccaccacacccggctaatttttcttaattttgtgtagagatggggtctcactctgttgtctaggctggtc

SEQ ID NO: 482585 - DNA, 1000 bp, Homo Sapiens
  misc_feature (1)..(1): n is a, c, g, or t
  misc_feature (3)..(3): n is a, c, g, or t
  misc_feature (5)..(7): n is a, c, g, or t
  misc_feature (33)..(33): n is a, c, g, or t
  misc_feature (36)..(36): n is a, c, g, or t
  misc_feature (66)..(66): n is a, c, g, or t
  misc_feature (85)..(85): n is a, c, g, or t
  misc_feature (93)..(93): n is a, c, g, or t
  misc_feature (99)..(99): n is a, c, g, or t
  misc_feature (143)..(143): n is a, c, g, or t
  misc_feature (157)..(157): n is a, c, g, or t
  misc_feature (196)..(196): n is a, c, g, or t
  misc_feature (214)..(214): n is a, c, g, or t
  misc_feature (235)..(235): n is a, c, g, or t
  misc_feature (269)..(269): n is a, c, g, or t
  misc_feature (273)..(273): n is a, c, g, or t
  misc_feature (279)..(279): n is a, c, g, or t
  misc_feature (285)..(285): n is a, c, g, or t
  misc_feature (345)..(345): n is a, c, g, or t
  misc_feature (761)..(761): n is a, c, g, or t
ntngnnnttttggcaaatttgccatcccttccnttnacggcctttcccctttcttttaaaaggggnccaacaggccttccccgantttttctntgcccncagaccagaaaggttttgggccccaaaccccagttttgcaaccncagattggtaaaangttcattcactgacaggtccacttcaccccaagtttttnggccattgaggtgaggantgattgaaaccttgatattantgaatcccggaggaaacttttctagcagcttcgnttgntgtggntgggantcccccgttaaatccaagcagatgaccctttagcatagctttctgttgaccacagccttntccacgccctggagggagggacagcttgaggaacatgacagatggggactcagcaccagtcacccccaccatttcatagatgggaacagctgaggctggagaggcactgactttcccaaagtccctaagcgagtttagtgccagagccaaggccagaactcagagctcctgactcctagttcagtgctccctctgcttggacaacccaaaccccagtggacgccttggaggaggaaagcgacacaagccccaagcagctggcgagggaagggctgaggatgaggatggtgcgaggcacatcaggtgtgggccagtcagggcccgtccccccgcaccccccaccactggggcaagctgggtggcccttttctggccaatggcacaagcacaactatctgggggtgggtggggtgggnggttacctgtctccccacttcactgttgtgtagacgcatcagtttattggcttgggatcctgtttttttcaccttcataggagcatcggaaaacttggcccccatgaggagcccgtagctgaggttgtccgcacatcttccccagcggttcccgggcccgggtggctcacctgggacggggccgcaggagcagccgggcaggtcgccggaggtgcaggcccgggcgatggcgtggctga

SEQ ID NO: 482586 - DNA, 1000 bp, Homo Sapiens; identical to SEQ ID NO: 309107

SEQ ID NO: 482587 - DNA, 1000 bp, Homo Sapiens
gatctggtgtccaatgttaaatttttcctcttctgctgtatgttccctcctattatccccagtctttcgtaaagtttgtgaaacactcagttcatgcttggaaggctttgagaaatggggagaggtctggagtttacacatggggcaaagtggacaggcttcctctcatttccccaaagccctgctagcataaacttgtgtttaacgaactttactaaaaactggggaataataggaaggagtataagattttctcaggtgagataagaggagctcatagaggtctagtgggacgggcaacagcaacaggcagatgtggtgaaaagtgaacacttatacgctcctggtgggaacgtaaattagtgtcacctctgtgagagagcttatggtgatttctcaaagaactaagagcagatctaccattcaatccagcaatcccaccactgggtatctacccaaaggaaaataagtcattatatcaaaaagacccctgcacgtgtatgtttattgcggcactattcacaattgcaaagatacggaatcaactgaagcatccgtcaaccaatcacaggataaagaaaatgtggtatatatacaccgtgttatgctactcagccttaaaaaagaatgaaataaagccttctgtagcaatttgaatggaactggggggccattatcctaagggaagtaactcaggagttaccaaatactgcatgttctcatttgtcagtgggagctaagctatgggtacacaagggcagacagagtgatatggtgaacactggagactcaaaaggggagagggtgggagggggtttgggggtgaaaaactacctattgggtacaaaatgtgcaattcagatgatgggtgcagacttcaccactatccccgactccatcactatcaaattcacccatgtaacaaaaaaccacttgcacccttaaagctactgaaataaaaaaaaaattaagaaaaagagcacatcagctctccttgggt

SEQ ID NO: 482588 - DNA, 698 bp, Homo Sapiens
aactcctgacctcatgtaattcacctgccttgacctcctacttccatccacttcatgtttcattttgacaacgaccctgggaggaagacacgagttacaacctccatctagcaagtgaagaaagtgaggctcagggaggctaagttccttgttcggcctggccaagtagtatgtgacagcatcaggattcaaactcagaactcttggactccaaaggtcccaaactctccccaggtttgttttttttttgaggtagggtctctctctatggtacaggctggagtgcagtcgtgtgataatataatagctcactgcagcctcaacctcctaggctcaagtgatcctcccacctcagcctcctgagtagctgggactacaggcacacgccaccatgcctggctactttttaatttttttgtagatatggggtctctctatgttgcttaggctggtctccaactcctgggctcaagcaatccatccaccttggcctcccaaagtgttggaattacaggcgtgagccaccgtgcccagcctctccccaagtttaaatgaacattttcgcccagggccagtcaggtaggcctatacctgtactcctgaaaccaaagcttggaaacctacctacctacctatctatctatctaataaagacaaggtctcactatgttgcccaggctggtcttgaactcctggcc

SEQ ID NO: 482589 - DNA, 1000 bp, Homo Sapiens
aggccttgcttgtttagattcttctttaccccaggggcctaattctgagcattacaatctctgtatcatagagataattagacattcaggcacagtaggagttgcttaggcatagacaaaggacaacaggttttgagtagacaatcagaaattgtgaattgtgatagggactcagatttcggaagaagtagtttcaactctcaaaagtttaaaatttctaacaaattagcaaaattaacatacctcctatgatgaaaagaaaataatctcagtgattaagcttcaagtgatatcttttcaaatagatgcaccaaatattgttacgcaagtcagtggttgaaaagcatatttacctaaattatcaatatcatgcttatttctcactcacctttctccaaatacttacataaattgccaaactaagtttgggtttacagagatatttacctgttaaattaagtttagcttaatgctgcctccttacatattttaagttcagcctaaaggtatctccctacaggtaaactgaaacctaactggatgtgtaaacagactgtaatctactcttatgctaaacaccatgttttggccaatcaaaggtggccaactgttcaaaccgtgttcaaataaggcaaatgccaagctataaccaattgagctgtttctgtatctcacttccatttcccatacttcactttccattttctgtggctgtactggagtctctctgagccttctctggctcaggaggctacctgatttacaaattcattctttgctcaataaaacttttaagtataatttgcctaaatttgtcttttaacatacctgatgtcaacttgtgtgcctcccttagagttcagcctgccctgcctatcctcctaagcttatttaatgtggcgcttaacctgatggcctgttgattgctcacaagattaatttgccctgaaacattccttttcatcatctcacactcttatttctgaacaaatttacaacc

SEQ ID NO: 482590 - DNA, 1000 bp, Homo Sapiens; identical to SEQ ID NO: 309111

SEQ ID NO: 482591 - DNA, 1000 bp, Homo Sapiens; identical to SEQ ID NO: 309112

SEQ ID NO: 482592 - DNA, 1000 bp, Homo Sapiens; identical to SEQ ID NO: 309113

SEQ ID NO: 482593 - DNA, 1000 bp, Homo Sapiens; identical to SEQ ID NO: 309114

SEQ ID NO: 482594 - DNA, 1000 bp, Homo Sapiens; identical to SEQ ID NO: 309115

SEQ ID NO: 482595 - DNA, 1000 bp, Homo Sapiens; identical to SEQ ID NO: 120035

SEQ ID NO: 482596 - DNA, 1000 bp, Homo Sapiens
gaaggagaactggaaaagagggatctgcaatcatcgatctggtgttggaaggtagatggctccattttgctctaaaaggaaaggggtttttagtcagattacaagaatgtttcctcacagctcaaaaataaagtatgcagttttcagcaaaatctgagaaacaggcatcgacagttttagcttgctttgtcaagattctcttagtacttgacaaactttagctcaaatttgtaaactctataagataaaaagcaggaactcacagtctgtataattattgagagagggatgtcattgtaaaaaaattttttgtttgtttcactatcatttattggattaggattagtgctgtactttatctataaagaaaacattaacaacccattaactctctgagctgattttcttttcttttcttttcttttttcttttttgagacagagtctcgctcttgctgcccaggctggagtgcaatggagcgatctttgctcacggcaacctccgcctcccaggttcaagcgattctcctgtctcagcctcctgagtagctgagattacaggcatgtgccaccacgcccagctaattttttttttttaatattttcagtagaggcagggtttcaccatgttggccaggctgatctcgaactcctgacctcaagtgatccgcctgcctcggcctctcaaagtgctgggattacaagttgtaagccaccacgcccggcctctgagctgattttctagtaaaagggttggttttactttgatctaacaacatgcttttgtacagttatcacctgaattggagttgaggtctatgtctatgaaggaaaaccagacttctggtccactttgggttcaaagcatggtctcatcggtactatcctgtgatcaatttgagcaattagtgaagccagagccaggagataaccttaccaggctctattgtaagctctatgaaaacagggatcgtatctgtcttgttcattgttatatccca

SEQ ID NO: 482597 - DNA, 1000 bp, Homo Sapiens
ttgtgaatcttctgtctcattgatctgcctaatattgacagtggggtgttaaattctcccattattattgtgtgggagtctaggtctctttgtatgtctctaaggacttgctttatgaatctgggtgctcctgtattattgggtgcttacatagttaggatagttagcttttttttcctccaatccctttagtattcacttaaacagttgaggcacaagcaataataaaactgcattttttacattacaaaaagattttgtatgttatctgcatgatataccaattttctcaatctctgctgcaataacatctcattaacactctggtccacaggttgatttaataaagtcagaatggcaggtgggaagatggtaacataaacttaccaaggggcaaaaggaaccaaacatttactgagtgcctactatgcatgctctactaggtttcacacacttttcataaatgtgaacccaagttctagttatcagttaacaggccagcattgctacggccagtaagtctgttttaaatgttctttcacttttaagtataaattgtggaacaaaacaatatatctttgcccaaagaagcatgtcaactgttgcactaatatattattttccatttccaaagtttttgtttttagtaagtgtgtaacattagcacatggaaatgctcaagctgtgtattagttcacagaaatctgggtttttttcattctcacctgctgagcaccatttggccagcatcactgcaacgagctgattctatcaccttgtaaaatttaagatgggaatggatagtgtttggcaattacatttctgggagaaaaaagtgctgatttttttctttaactcaacacagctagctttaaaaagtggtacctcattttaaagcaccaaagttgtcatttaaataagaaaatgtacttggcttaatgaactgtaaaatgaagacaccactgcctttttgagcattacagcaaagccagtatgttca

SEQ ID NO: 482598 - DNA, 125 bp, Homo Sapiens; identical to SEQ ID NO: 309117

SEQ ID NO: 482599 - DNA, 1000 bp, Homo Sapiens
cagaaacattaaaacaatggaattttattttgatgaaaaactcaagtttacaatcatttagtaaatgaagagcaaacacttcattttcctatcccataactcttaagaaaaaaaaagcattagtaaataaatatctgtgaacagattaagggtaaggcagactggataataaaccacctctgacattcacactccctgcatgtgactcactctaaagggtgaaatggctctggagataactgaactggtaagatatgggcattaaatctcatcctgatcattcagataagcccaagataaatactttttgctcatcaagggcagcaaactatacaaattgtactggaggaatactttgacagaagcacttaaattatattgtgcatcacaactataaaatggcttgaacatttccatttaaccaccatttataaagtgcaactatatattactctgcattttatctgaggtgtgatgaatatcagtccaaactgaaagtaccccagctgccaatttccaccacttctgaaaagacctagctgtgtgaaaaaggaccatcccccatacaaagaaccaatttcacaaacctactggtaaacaaatacatttacaactggaacttcaaaatgctagagttgtactcatttaaaaaaaaaccattcagctacctttggtctttaaaaaagcctacactgcaatatcctaaacattgttatgtgcatctcacaatgaagaagagtggccttgcagtgcagaatgaggagagtacaacgtcactgtgaagagtagcatgctatggtttcaaggaagatcagcatcacagcattggattctgtgcatcaggatcgaggtcactgttgccagaaggggggtggatagggagaatatccagctcatccacttgtggagttggatgcatgactaccagctggtcctggggaatgtctgctgcagctgctgcaagattggtgatagatttactctttacacactgaaagtc

SEQ ID NO: 482600 - DNA, 1000 bp, Homo Sapiens
taatgtgacaagttggaatttcacaccacctgacaggatgtcacgagaacagcatcgcttctgtaagattcctgaatctcatcataatcagacgtcagacgaacccacatggagggatggtttacaaaataactggcctgtaagcttcaaaaatgtcaaggtcatgaaaatcaaggaaagattgaggaaccgttcgagattggaggagactaagaagacatggccgaggctgggcgcgatggctcacacctgtaatcccagcaatttgggaggctgaggtgggcagatcacctgaggtcaggagttcgagaccagcctaaccaacgtggagaaaccccgtctctactaaaaatacaaaaaaattagccgggcatggtggcacatgcctgtaatccctgctactcgggaggctgaggcagcagaatcgcttaaacccaggaggcggaggttgcagtgagcccaagatcgtgccattgcactccagcctgggcaacaagagcaaaactctgtccaaaaaaaaaaaaaaaaaaaaaaaaaagctacgactgaatgcaacacagaattctgaacaggatccttctgctatcaaggtcttctttcggatgactggtggtttgctggcaatagtttggcagcccttggtcagtagagcctcaccccaatccctgcttccatgttcacatggtttcctctctgtatacatgcctgtctctgtctttaaatcccccccccttttttaaaagaattttatttcaaatctgggatacatgtgctgaacatgcaggtttattacataggtatacatgtgccatgctggtttgctgcaccaatcaacccgtcacctaggtattaagccctgcatgcattaggtatttgtcataatgctctccctcccctaaatccccccttttctttccttttttttttttttttttttttttttttgagacagagtcttcactctgtcaccaggctggagtgcagtggcatgatttggctc

SEQ ID NO: 482601 - DNA, 1000 bp, Homo Sapiens
agaattgtttgaacctgggaggcagaggttgtggtgagctgagatcgcgtcactgcactccagcctgggcgacagagggagactccgtctcaaaaaaaaaaagaatataaggcagaccttgcccggctctgaccaacaccctccaggggctcccatctcattcagccagaactggagtcctcagaatgacttgctaagcctgcacatctgaccccagccaccttctgacctcattgtcttcttctctccctcccccaccctctctgctcagccactctctgcctcaggccttgttagctgtcaccaagaacctctcatgctaaatggaatgcccctgggtgacttttcccgcaccctggcatcccctgcctctggaacacggcctcactcacagtgggctctggggcgcttgttgtatgttagaagctctccctgttaaggccgctgtgtggaaggggcagccacatggttgcctcctccaccgtttctgtctgcctctgatggccctccggctcccgactgcctgcacagtcggggggtggcacagtgcctgcaaatctaagccaccctctcccactccctgagcagctcctagccaatgactggaaagcctggcacccttgctttcatcgcaggctctgcttctggggtacactctgagacaggagctttcctctgtcctctcccgcaaagagccggttcaacctgggggtctgggacgatgagggactgaggtgtctagatacactcccctgtgcgtggcccaggctgcatcatctgcccccactgcctgggccaagcccctgccctggcttttcattccctttgggaatctgacacgttcacgacgcaggtacacaagccttcccggggccaggatgctgtatacacaagataaacggacttgggtcttagtcccattcccctcgggtcacgctcctcctccacccagggtggctacagtcatgaacctgacaggtgtccttctagtccatgcttt

SEQ ID NO: 482602 - DNA, 1000 bp, Homo Sapiens; identical to SEQ ID NO: 309118

SEQ ID NO: 482603 - DNA, 1000 bp, Homo Sapiens; identical to SEQ ID NO: 309119

SEQ ID NO: 482604 - DNA, 1000 bp, Homo Sapiens
ctgcagtgagctgtgatcacaccactgtactccagcctgggtgacagagcaagaccctgtctctaaaagaattttttttaatttaaatgtttaaaagagagaggggaaagaattcttttaactgcctacagatgtagtccctgcccccactgctaggttatccctgcatcttttaaaaaaatattgaagttatgggcaatgcatgtatatttccctcggatagatgggcattcctgagggtcctctctctgcatagtttcttaggtgagagatcccacccttgcccaacatctttcacctctctcttctgctcacaccactggcagcataccctgggcctttgctagcctggaagacaccattgagcatgttacaaaaaagcaccatggagcacacctagccctgtgtgagtgcaagaccttacaggtgatgggcagactggctttcagcaccctcttgcccacacatccaggggcctttgtagacagcggccctgagaccaccccatcagctactgctgttaagatccttgtaagctaagcagtggatctcctattggtaggatgagcactttaagactcaaaggggttactattaataactatgctggcacaactggcataaactgggtcatttcccagacaaaatgggacatgtgattcccccaacctttgcggagtgtcactgggaggatggctcgagcccagctcccttccacaggatcactcggccaatggaaagctcattccatgtggtgggagagcagcctccagcaatccttttccctgctttggttcctatcttctgttttcttctcccctgctcattttggctcaggcaaatcatgaggttcaccatgtaagctgacatccaactggaaaatgagttgccttgtttgcaggtacttccagtttgtacaagttaccctctggagaccccttcactgggcttcaagagcagttagaagtaaagacctctccttcacaaaggtggaacccac

SEQ ID NO: 482605 - DNA, 1000 bp, Homo Sapiens
gagctctgcctttgtttttaataaatggtgtcaatatttccatttatatcaggtctgccaaaatgctccttggtctttaagctaaatgagtttggtttctcttcaaatactaatttttcattggcagcacatatagaatgtaaaagtgaaacagtgaaataagctacaggtagaaaatagtcagcttagagaaaagcagaataaaatttttttcccaagtttcaacatggtaatgatgtgacctttagctatggtaaaactatttgactaagtgggtaaatggaaattaatatcctggtatctgcaattaatccaagctttctgaggactaaatccatttatttctctatcctttctaaggagaaaatcctaacagtgtggacttagtgtgccattccaggtggtagttgctgtttcagtatttttgtatcaaagttgttgtaaccctattaataaattatttcaaggttaaaaaaatacccaggaaaccaaattggaaaaagaaatttttttttaattagaaaccaagtttacatacggttaaatggttactaaaagctcagttgtaaccactcctaacaccactagcagaacctcaagggagccaagagctcttcccttttcccctgttaatttccagtataatgtagcagcacaattatttcatgtcacatttaagaagaacaagaaccaatttatataaagtacaattgtatatccttaaacattccacataaacacactgtcaaaactcactggatatgctggaattggaggacttaaatttctacatattatttattgcacccagagtactggttaaaatgcactttctgtgaagatcaaatgcaataacgtatgagggtatttttaacactgtgaagtacacacataatattataaaatgccatttaattggaaggagttttctatcattgcaagtcataaatataacttttaaaagaatactagcagcttttacctaggctcctaaatgctt

SEQ ID NO: 482606 - DNA, 1000 bp, Homo Sapiens
tatgtttgagatacttaactagatatccaagtgggaaatgttaagagggcagtcagacataaaagttgggagttcaggggagagaccaagactggagatttaaaggtatagaacggatgaatgggagatcatttgggaattgagtgtaggcattggaaagagatctgatgaaggagccctggaatgggccagtatttagaggttgggaaggtgagaaggacccagcagagaaagctaataaggtagaagagaaccagaagagtctacagtcatagaggccaaataaagagtttcaagaaggatggagcaattagtaactgtttgaatgccactgaaagggtgactgggatgacagctgaaaattgaccattcataatatactttccataggcttgtaaaggagtaaaatttcaattgtgatatttaggaagaatcaaagtctcctttactcagtcccaagctctacatcaggatttctcaaccttagcataattgacatgttgcactggataattgttatgggggggctttcctgtataagcctcacccctggcctctgccactagatgccagtatcttctgattaactgagtttttgtatttttggtgaactaaatctcacattgtttcaaaactggaaatggcaagtcactagaaagtgaaagcatacctacctgagcattgtaaagatgtatcgtggactagcagaatccttgccaccatgtagcctggtaccaaactgaccaatgggctgcaagaggtttagattattgctacccacaaaattctgagccaaattgataatggtcatcattagtgacatctgtggggaaaaaaagattcattaagctgaggcttttactaatacaaatacattatgacttaacctcactataatcctgtaacattttgtgaggtctagttgtttagtgactttcctcagattaatagatggcagaaatagtacttgaacctacaacttctggctccaagtttaggg

SEQ ID NO: 482607 - DNA, 1000 bp, Homo Sapiens
  misc_feature (27)..(27): n is a, c, g, or t
  misc_feature (45)..(45): n is a, c, g, or t
  misc_feature (71)..(71): n is a, c, g, or t
  misc_feature (86)..(86): n is a, c, g, or t
  misc_feature (95)..(95): n is a, c, g, or t
  misc_feature (114)..(114): n is a, c, g, or t
  misc_feature (122)..(122): n is a, c, g, or t
  misc_feature (162)..(162): n is a, c, g, or t
  misc_feature (181)..(181): n is a, c, g, or t
gaaccccagttttaatctcttatcttntccacccaattcccaccnggagaagtttttgggacccatacaanttccattaggaaccntcaagtttncactgttgagttgggagancaggagantttttggagtgcccttggttaaaatattcccaaagtacangcattccttagcagtcaantaggcattcacataatttaattaatcatgtgatttggagaggacagagatcatttacagcaatggttattacacttggcttgcccaacagaaatatctgatttgttggtgaaaaacatatttacatatcccaccaactcaacgaatctgcaaaatcagtccctgtcatctccatattcaagatgactccaggtaactgtgatgctagcatatcccagatgactacacatagaggagtacagaccaactatgggattacaaatataacacattgatttcatagatgaagaaaatgaaacaaagatgaaacagagatatgaaaacattacagatcatggtataaattttctgaagatcatttatattcagaaggataaaagccagagatacacctttcaaatttatactggttaagtctggctttatatataaaaggacactatgatgatattaatagaaacatgcattaaatcctaagcaagtactcacccaaaatttcatcaaagatcttgtataaacctggcacaaaggtaacctccctgcaattcattcctacatcttcatcatacacccacatgaactgcattgaaaaattcaaaaaaaattttactcaataaatccttaatatcaatttttcatagtataatccacatcctgtcatttacactatatgaatacttagatctgcaaagtagaaaaacatatacaacttcagtaatagtcaacttcactattcatattaaattaacctcaaaattgagaaattgttcattttgtatcaagtttgtattattataaagtcagttttaatgtaagacat

SEQ ID NO: 482608 - DNA, 1000 bp, Homo Sapiens; identical to SEQ ID NO: 309123
  misc_feature (36)..(36): n is a, c, g, or t

SEQ ID NO: 482609 - DNA, 1000 bp, Homo Sapiens
tgatccttctgcaggttcacctacggaaaccttgttacgacttctccttcctctaaatgataaggtttacgaaactttccttacatgtattgctacaaagtatggtccgaataattcaccggatcattcaatcggtaggagcgacgggcggtgtgtacaaagggcagggacgtaatcagcgcaagctgatgacttgcgcttactaggaattcctcgttcaagatcaataattgcaatgatctatccccatcacgatgcatattcaaaagattacccatttccttcgaaacaggaatatatacttgatggatgcatcagtgtagcgcgcgcgcggcccaggacatctaagggcatcacagacctgttattgcctaaaacttccctgtattaaacatacaaagtccctctaagaagacagataaaaaatataatatttcttatgtctatttagcaggttaaggtctcgttcgttaacggaattaaccagacaaatcactccaccaactaagaacggccatgcaccaccacccatagaatcaagaaagagctatcaatctgtcaatccttcctatgtctggacctggtgagttttcccgtgttgagtcaaattaagccgcaggctccactcctggtggtgcccttccgtcaattcctttaagtttcagccttgcgaccatactccccccagaacccaaagactttgatttctcataaggtgctgaaggagtaaggaacaacctccaatctctagttggcatagtttatggttaagactacgacggtatctgatcgtcttcgatcccctaactttcgttcttgattaatgaaaacatccttggcaaatgctttcgcattagtttgtctttaacaaatctaagaatttcacctctgactgttaaatacaaatgcccccaactgtccctattaatcattattcttatcttagaaccaataaaaaagataaaaatctttaatattattccatgctggagtattcaag

SEQ ID NO: 482610 - DNA, 1000 bp, Homo Sapiens; identical to SEQ ID NO: 309125

SEQ ID NO: 482611 - DNA, 1000 bp, Homo Sapiens
tttttttttttttttttttttccaattaggaaaagcattttattataacctccctgtccaagtacagggaagttcatagaagccaaaagataagactttacagtcagtctcccctttaccaattatagattaatatcatagttaacataatttctaaaagtggggaaagagttttacaagtacatatatttgattttattctgttactttttcacactttccagaaaaaaattaattttactactctcaaataacagtaaccaaacaagttgacctaaaataaggaacaaccaaaaatttgtggaactgagccacaaaccagatgtgtgaaatgcattaaatgcctaggtttgggcttcggttatctgagtcctgacctggatggggttgtgtttcaggtgttctactgactaaaaatgtgaaatatttgtattgcactgaatcttaagaggctttcatgaagccttgctcttcaagaaataagcacagaaaatagattaacaaagcaagtatgtcttacttcttccagggcctctagttcttcctctagctgctgagtttcttccttcactgccattaggtaatctgtaactgactgtcggggctgcatccccttttcaaagcggttatacattccactccaaaacttgtacatgaagttacatggtgttgtagggagatgaaaggttccctgagtctggctgtgatcagctctaaacagaagattcaggttatcggcccgattcttccacaggtgagcccataatgagtatgttctttcttgaatcttgagttctcgtctctccttttggctgttacataggaagtttccaaactggcaggaataaatgtgatgttgaatgtgaatcaaaaacctctcattgaactcaaaggcacagggaaattgttccattaactgccaaacacactcaatgaactggtcaataactggagagatttcttttgggtcaccatctagattgccatatcggtgattaaa

SEQ ID NO: 482612 - DNA, 171 bp, Homo Sapiens
  misc_feature (20)..(20): n is a, c, g, or t
  misc_feature (78)..(78): n is a, c, g, or t
ttacaaacagagtgtttccnaactgctctatgaaaagaaaggttaaactctgtgagttgaacgcacacatcacaaagnagtttctgagaatgattctgtctagtttttatacgaagatatttccttttctaccattgacctcaaagcgcttgaaatctccacttgcaaatt

SEQ ID NO: 482613 - DNA, 1000 bp, Homo Sapiens; identical to SEQ ID NO: 309126

SEQ ID NO: 482614 - DNA, 1000 bp, Homo Sapiens; identical to SEQ ID NO: 309127

SEQ ID NO: 482615 - DNA, 1000 bp, Homo Sapiens
catggctggggctcttcctgggcagctggggagggctgtgggtcctggctgggtccgcgctcggctctcgcttctgctgccccgcgctccctcgcgctcttctgcccctcgccggagcgtgcggactctgctgctcgctgctactgcgccgacagccctctggaggctccaggactttgcaacttcaacaaaactcccctgtagtccgtgtgacgttactgttgttaagcaaagatcaaagcccggcagagaatgggagcgggaggggggcgggggcgggcgcagggggagggggcgcgggcagaacgccgggagcagcgaggggcagagctttcaagcgttccaagggcattgaggagcgagctggagaggcgcggggatgcggggtcctcacgctcttccggaaagggcgggggagggcgcggcaagttccggagtggggcatgcgtgggagcccacgagcggctcagcgcggatcctcccgcggaaaaccggctcccgcgagcgccgccgcagtttcctaggcccgcgagtccgcagcgaacgcctggtctccgtccgacgcggggtctgctcagcctcgggtgggccgcggccaggcctgactgcgggggagagggccgaacgtgacctccgaggtcacccccagccagctttctctcctgtggtcgaagtggttttcttctcgatctgggcgcctactccccaccacttggtctgagagggctggggccagccggaaggcagggatccctggtggatttgggggatattgctcaggtaccagccgatgcgttttgaggggcgggagtcgaggaattagaatcgcctttaaccctcaagagttgcgccttcagcctcgggatcccagatgcgtcgttggagccaggccgcccccctacctgttgggtttgcgttttaactccagcgcacaccttgccggcagcttcggagctaggggaggggtctcgtttccccgcagcccgccggacagacgact

SEQ ID NO: 482616 - DNA, 1000 bp, Homo Sapiens; identical to SEQ ID NO: 309128

SEQ ID NO: 482617 - DNA, 1000 bp, Homo Sapiens; identical to SEQ ID NO: 309129

SEQ ID NO: 482618 - DNA, 1000 bp, Homo Sapiens; identical to SEQ ID NO: 309130

SEQ ID NO: 482619 - DNA, 1000 bp, Homo Sapiens; identical to SEQ ID NO: 309131

SEQ ID NO: 482620 - DNA, 1000 bp, Homo Sapiens
tgtcaccagggttgaaatactcttctgtgtagctttctagaaacagtgtgacatttgtggacagaggaaagtaagggattaggcaagcaggaggaggcaaaataatgatggtgccctaagcaatccaccaagagagaaacttaactgtagccatctgggagtgagattcagtctgtcaagtgggtcctgacccctcccaggcctatcccatctgggttgcccagcctagaaaagcagcagctgggtccgcagaagagaaggaggaagtgttggggaagaaaggagggtagagaagggaggggagaggaagggagataagccagacttggtggggccttgaggtggagtattcctaagaaggaggtgggagactcagttcaggctctggtggaagcccgaagttgggggagagtcagggacctaacagcccctcttctctgcgcctgagtattggatgccctccagtggcacctcagctgttgctcagtctagcagaggcatcaaaagaggtagggaagagacaggaggtcccagcaggtgagaatggctggaaggaggcagggcaggagacaggaactgtaggggggacaggagcaggatcaggaactgtagagggacaggacccccttgagaaggacagtggtgactggggcagcttggcattgacattgagactgtggacaaatgctgggcatttaaagggctgcatgtgcaagtactggggacttcgaattctcagatttctgggacaaggagcagctgctgcctcccaagccagccccagggagagaagagggtggcccagcagctttgccagttggagctgggaagcctggagtgtggaggtgctcccggccacccagctgtatcctcccttggagtgagagggtgttaagccgcctgtcaagtgacgatccttgcagctcacgtcccttgaatgactgtgctggaaacgcccccagcacaacaacctcggtaacaaggcctcgcattgcccggt

SEQ ID NO: 482621 - DNA, 1000 bp, Homo Sapiens
gggggcaagatgtcccacacaggcagcactggcatctggcctgtaaacccaagcgccctcccagctggctctgctggcccatgggccctggggtgggagagccctgcaccaaccacacagatgacactgagacaggtgacgggaattaaataacttttgactttatttcactagagataaaaccagcagcatcacagcttgagccccttacccacccccttgtcctccccaccccccactcttctgcctaatgtcggtaatgggggcttcgggatcgggaccttgagcgcctggaaagagaaagggaggggccgtgaggatggggcatacacacatcaacacacctggggccgtggatgcttcagtgatcggggcacttgtctgtggagggaaggatgttccccaagggatgagaccagcccctccaactggaggtgggtacagggtgaggctggaggaatgacagccaggacctcccatcaaaggacaagtgttacttccaagaaagtggagggtcatgggcttccttaccttcgagaagagctgtattctcgacctggaaagaaaacaacaggtgaagagcgagcaaacatccagggccagggcctcttccttgacctggggtgaggtcctcaaaactgaacttcaggggttgtctccaaatgaggggacatttccagagagtccagtggctgccatctgtgcccctcaccagcccatgccggaatgagcacttctaattgctgcaatcaccttgtgactaaagcaatctgtgtgtgtgtgtgtgtacgtatgtgtgtcaccatgttggtcaggctggtctcgaactcctgacctcaggtgattgatccacccacctcagcctcccaaagtgctgggattacaggcgtgagccaccgcgcccggctgtactatggtttttttggtaaccctgcttgacacttttctttaaagccccagagccctgcagcctggtggggacactcactgtatcgggggg

SEQ ID NO: 482622 - DNA, 1000 bp, Homo Sapiens
agggggggttaccaaggctggagtttaactatttttttttccaggcataaaacatagtagagggtgtccacctacttttttttttttgagatggagtcttgttcctgtcacccaggctggagtgcggtggcacgatctcggctcaccgcaagctccgcctcctgggttcataccattttcccgcctcagcctcagtagttgggactataggcacccgcaaccacacccggctaattttgtttttgtatttttagtagagacggagtttcaccgtgttagccaggatggtctcaatctccttacctcggcccgccttggcctcccaaagtgctgggattacaggcgtgagccaccgcacccggccccacctaccttttaacaagtgttccctggtaatgtggaggcccacagggtggcagcacactgtcctccagcacctgtggtggcccacacatccactcagagttgagtcacctcctgcctgtttcccgcgtaggggaaccgagacctttacctttgaagaggaggttggccttgggcaggtccagctggtacccgaaggagacgctggtgtcctgcatccttgtgctggcctcaaactccacacccacctgcagctggaggggccggagcaacacatgagaattagcaagtggccccacctggacttccaggcccagcagcccctggcagcaccagctagtccctgcacccactcacctggtcactggctttgtggtagtatgttgcgtgcatgcccgcctggcccaacgttaccgttgccaaccagttgttcactgtcagagagtggggtggaggcggggtctcattaccaaggggatttgggcatctgggaacccaggcctcctccctcagacctgagtgtccagggccctagcccgtcctccctcagacccaggaggagtccaggggcccagcccctccaccctcggacccaggcgccaggctcacatgtgtatttcccagctagagacatgac

SEQ ID NO: 482623 - DNA, 1000 bp, Homo Sapiens
atgatcggggagtggagttggatgagctgagatcgaacatgcactcagctggggcaacaagagcaaaactcgtcccaaaaaaaaaaaaaaaaagatgaattgtaaagtaagagaaagaacagaccttgcagttaagtcaggtctgcagtcaaatcccagctctgtcatcaattatctgtgctccttaccctctctgagcctcagtttcttcctctacaaaatagggataaaatgtatgtgaatatgtgtgtggcaaggctccaggcctaagtgaggccctccactgtccccaggcctgtctcccacctagaagaggcagtggggagggtttacccaagctgccctctgctctaaagtttcatgggtggcctccagtcgcttagaatctccatgatcaaggatgagaggtcggaggtcagggggtgggtacctgtgccgggggctgacgtgaggccggagccgcaccctgcagatgccgtcggtgcagtctttccccacgaggctgtgggggtggactcggtgaggccagtccttccacaccaggcaggcagtcacctccacctcccgcagccctccacaatcccggagctgcaggaagagaagtcctctttgggggtcccatcaccgatgcctgcgtccatccaaactccttggggccttccttggcagctccccaatcctctccccactagggtcctctgttgggagctccccaaccttctcccgcgaccaggatgatggaatgtgtttgcttaagaccactttgggccgggcgaggtggctcacgcctgcaatcccagcacgttggaaggccgaggtgggcggatcacctgaggtcgggagttccagaccagcctggctaacatggtgaaacccagtctctactgaaaatacaaaaattagcccggcatggtggcgcatgcctgtaatcccacctgctccggaggctgaggcaggagaatcgcctgaacctggaggcggaggatgcagtgagccgagt

SEQ ID NO: 482624 - DNA, 1000 bp, Homo Sapiens
gacctgcccgcctcggcctccccaaagtgctgggattaccggcatgagccaccgtgcctggccacccagctaatttttaaattttttatagagacagggttttgccaagttgcccaggctggtcttgaactcctgggctcaagcaatcctcccacctcgacctcccaaagtgttgggattacaggcgtgagccacagcgcctgagccattcatgcctctgtaagcgggacattctgacacctgcagccaagggcaatcctaacggccacagcactctcaactcactcttgtcatagacgggctcggaaagcacaggatccatccggcgcatctgtccctgctggtcccgatatgaggcctggaagcagatcctcaccacattcatgtctacttcctgatggttcttcagggacccagctgtcgggggagatatggggaggctgagggtgggaagtggagaccctctctggggtacaggggaacggggaagggatggggctggaggagacggtggggcctggagtggtgaggggaccagggtgagcacggaagtcaaggggtttgggaggacgggatggtcaggtcaggcagggggtgctcaccgttgtaggggtcaatgcccagttgaatcttccgctcaatggcagcctcaatctccttcttcctcacacactggatgcccaggttgttaaaactgagggggtgacgggggagggagaggagtgctcgtgagcaggcaagtgtggccctaacctgcaggagggctctggcagatgctgctgtggggctcaggctctcaggggctgacatcccaggcccaggggtcccagcattagaaacggtctggggtttaaacctctcagaaggccagcgcgtgggctcacacctgtaatcccagcactttgggaggccgaggcaggaggatcacttgaggtcagtagttcaagaccagcatggccaacatgttgaaaccctgtctctactaaaaatacaaaaatta

SEQ ID NO: 482625 - DNA, 1000 bp, Homo Sapiens
ttttttttttttttaacaggaataaaacagtgaaaattacaaactgtaaaaaggaagacaaatcttgtctccaacttttcagagaagcaagatttaacacagcacattgaagatcaatacatatttgaatttaagaacaagaatttaatattacaatattatacactactttacaaaattaaaatttctatataaggattacatttgtaatagttaacaaaattttgaaatcacatttaggtggtcccctagataatagctgttatgcatctttgattagaagaaataaatctttattctaattattgcaaaacagtctattagactcaatacattaaattaaaaacagtgaaaatatatgcaaactaaaataaatggtactgcttgagtgactattagtatgtcagacttacagaaatgttattttaaaaatcctagaaattagaaaaatagagtactttttatggtagaactgccatgctcagatttaaataccaagattgcccttgtctgttacattagtagttgtagatctgtagaaaattcaaggatctttcataatttacaactataattaaaaaaaatatggcatagtgtaaatattagtcgctttacatcaaaaagtaatacaagatgatatggcaggtagtgccctattgggggaaaaaaaaagaatcaaactaaaaaacacattcaacattgcaaaaaataattgccttatatcagtatctccaaaggctcattcatctctcattatgtggagaacaaatattgtgaatcctaactaaagttatgtttttcatgacctgttataaaattattctgaattgcacatgttacaccgtatctaaaataatatttaaaagtaaatttgtgaaatatactaaaaaagcatgtggtaataacaagagtcatacccacttagggatgtagtgaggcacaaggaagattatccctaaaagcacaaatgtttccctctagaagattctttactactaag

SEQ ID NO: 482626 - DNA, 1000 bp, Homo Sapiens
tttttttttttttttttttttttttttttttaatctctccactccttcctccctgggtcagttcatcctcaggctggcttctgcaccagactggctcctgcaccaggctgtggggaggctgggggtgtgtagagttctggacactttgtcagggtaggagggaaatagaacttgggagccgcagctgacatccaccatactgtaccacccatagaagtagaataataccttactaacttggaccagtcattggggataatagtgagaggacactcaaccttaactagtaaaagtttgaatcttcaagtgttttaatgtggtatagtgtcaggcaggatcttcccaaacacatcctgttggaagcagttagcatctgtttttcagtatgtcttaaaacgtacgaccttctagtaggttaaatatatcttctgaaatcccgtttaatttctaatttgcttattcaaccttttaatagccagagtaaacactgaactcaaattctgggttggtgaagattaaattacagtaatgaggttcctcatttataagctcatctataaaatggaaataagaatagcacctactttataggtttgctgtaaggattaactgaggtgatctgagtcaagcgcttagcccagtggatagcccaataaatgttacctttattagtgtcatatattgccaaatattgtcacctttatgtttttatgtgcatgtttaactagaaaattaattctcttcgtaacaaatatattatctgctgctgattagttctgttagagaggaggtaaataaaggtattaaaatatttagtgtttatggattctttttttaccgaagttttttttttctgttagaattcattttgggggaagcctaaatacagataagtttaaggagcatacaactgaaaatagatagaacctctagaatatagggattttaaaattttatggcaatatgttcttatattcttagttgaaaaatctcttaaata

SEQ ID NO: 482627 - DNA, 1000 bp, Homo Sapiens
tctcctccctctcatcccagagaaacaggtcagctgggagcttctgcccccactgcctagggaccaacaggggcaggaggcagtcactgaccccgagacgtttgcatcctgcacagctagaggtcctttattaaaagcacactgttggtttctgctcagttctttattgattggtgtgccgttttctctggaagcctcttaagagaagaacacagtggcgcaggctgggtggagccgtccccccatggagcacaggcagacagaagtccccgccccagctgtgtggcctcaagccagccttccgctccttgaagctggtctccacacagtgctggttccgtcaccccctcccagggaagcaggtctgagcagcttgtcctggctgtgtccatgtcagagcaacggccaagtctgggtctgggggggaaggtgtcatggagccccctacgattcccagtcgtcctcgtcctctgcctgtggctgctgcggtggcggcagaggagggatggagtctgacacgcgggcaaaggctcctccgggcccgtcaccagccccaggtcctttcccagagatgcctggagggaaaaggctgagtgagggtggttggtgggaaaccctggttcccccagcccccggagacttaaatacaggaagaaaaaggcaggacagaattacaatgtgccggcccagggtgggcagcggccctgcctcctacccttgcgcctcatgaccagcttgttgaagagatccgacatcaagtgcccaccttggctcgtggctctcactgcaacgggaaagccacagactggggtgaagagttcagtcacatgcgaccggtggctccctgtccccacccccatgacactccccagccctccaaggccactgtgtttcctagttagctcagagcctcagtcgatgcctgacccagcaccgggcactgatgagaaagtggctgtttgaggagccacctcccagccacctcggggacagggccagg

SEQ ID NO: 482628 - DNA, 1000 bp, Homo Sapiens
agtctgggctttcagtatacccatctttattcttctctctacctaggcaagagagccattttagggatgaaaacctcaagatagagcatctaagccaagtttcacattactggtttcttgtgacatttgctcctgtagaatcgtccagtacaatcagtagactgaactgataagacccttcaagcctttattacttttctactacagccaataacacatagatttaagagatggaatgctcttaaaagatgtttaccccaaaacgagcacgtatgaaatatgttaaccacctatttctcctgcaaggtgaccctagacaggacattctctctggacttgtttctcctggtatgacataaagaacgttgcgtaacagcttgtttttctttagcactacgtgcctgccgctctgctatgcattttacgtggattgtcttatgtaattttcacaacagcccagctaataaatgagaaaactgaggctcagaggtgagcatctgctaacaaatgtcagtgcagtcccatttctgagcctatgtccttaggaacttcctgtattagtgagatctttcccagctctatatgaattcagcatattcttcttggccaaaataatttcctcaactggcaattagggtccaggaagtttaaatcaacgggatgacagaatgacaatggagaggtctccaaccacaggccaaacagcatgcttccaccccaagcctgagattggtaatttcctataaccttgcaacagcctccctcccacacactgggcccagggtgcctgcaaagctttgctggaggctgggtgtcaggtgtgagaagctgctgggagttacctcctccctcacactgctccacctccacctctgccggaggatggaacttcagaaccggaggcccacggcagcctgaagaaaatgatcaggataactcatttgtaaaaatctgtttaataaatatacatcataaaagtaccaaaataattaccaacaat

SEQ ID NO: 482629 - DNA, 1000 bp, Homo Sapiens
gatccaggaagtttgttgaatgaatgagtgattggcacattctgggcaggtgagactctgggctcctggggtcgaggaaggaggttgctgatagtggactccctgcagtcaccaagctcctttgggctgaatcagctcaggtttcagccctggtccctctgaaggggagagaaagtgtgttgaaaagacaaatgcttctgtgtatatgtggtgtactcttcaactttccagcagttttagacaattctctcccttcctcatttccaggagactgtctggcccagaagaatgcctggtttccctcagggcagggcactcccctgtgcagacaggcgggcatggagcagaaacagccagggtggacgagcttttcagcagcatgaaggcaacagccgatttgttcacagtcgagagtgaaggaatgaatttacgagaacctgcatgaactatgtgatcatagtgttggtggtcagactgtgaggcacaggaagatggatcagagggtcaaaggggcaccatctacagctcatttccccgtcctccaaccaatgggcctgccccagacctgctcccctgtccctggggaggaggaggatattccagactcacggacctgaacctctctgggcatatgtccagtctctgtcctgcagagatgccttgggcctcccatttcaacagcatccttcccctgatgtgggaaagaatttcctaatcgccctcacctctggcttcaggtccatgcaacacaagccctgtttcgggcctcctgtgttcaggctcctgagcacggcttccctttttgaaaccaggtattcgctgtttcctgcatatcagtggctggacacctatgagtttgcctgtgaaattctacagaaaggccaagggagaggcagggagagaagccaaggagacagagtcctatgggcttcagggagcacctgcccccagggctgttccaggagccggactggcccttcagtagatttccaccctctct

SEQ ID NO: 482630 - DNA, 1000 bp, Homo Sapiens; identical to SEQ ID NO: 309134

SEQ ID NO: 482631 - DNA, 1000 bp, Homo Sapiens
gatcagtgtgcagacagaaagggctccctcctccttctccatatacctggatattggattttcaacacctgaggagaggaacccagggctggggaggaggtcgccttccggaagacatttcagatgatgcattttccgaaaggaggtcgactcagacctccctgctcccatcctcctgtctgagaacctgtgtctctcttgcttccactgacatcgactccaaaggaaataaaattaatcacccctgcctggaagttatcctgcctgtgagttacacaccggcttacaaagggtggctgaaacgccccccatcaggcaccctgtctgcctagtcccacagctggccagattttgatgacaaaggtgatgttgctattgtcaccctgataccgcgtgcaaaaatgagatgaaatatattttgactggtttataaaaaacaatctgacataaagtaatattcatctttgatgaatccaatattcttagggaatgatattaggcggtatctattatatctttcattgtgctcccatctgcccttttcaggagctaaattatgtgcattagtacgtaaatgggctaatgcctttctgtatttagaggactgcacgccgtgaatatattctctgcttcaagaagtaattggtaattacaatggtcatttaggcaatcactgtctctgctagattcatgtcattcttaaaaataactagctcttaacctttgacagaattctacagaaactgttcatcatcgcccacgctttgattaatttcacacatacacaaacctgtatcaataaaagtgatggttttacatttgttaaccacagcaatttgcctcactcatcaaaacagcttaatatcaggtaacagtgtgctccaaatctcattagtttcattttataaacagttttatagtaccttacttggaggaaaaaacagtgcattcgagctgttctccccattcaaaccatctctaaaccaaaggcgctgcggta

SEQ ID NO: 482632 - DNA, 1000 bp, Homo Sapiens; identical to SEQ ID NO: 120037

SEQ ID NO: 482633 - DNA, 1000 bp, Homo Sapiens
gatcctaaggttgttattgactagtgacgggccctggggtggactccagggaggtgagaggagcaaaatgaatttggcccttgctcttgagggccattcaagttggggaacggggagacagagaagcagataggcaaggataaaggctctgtggaagagggtgcaggagactgcaaggaccagtgtttcgggcaggagttgagccacagagggtggttagaacttagttcagtgaggcatgtggctgtcaggtcagcgtttgtgtgaacctgttgccagggcaccccgtaggcctgaaaggttgtgaaaggtgtcccactggctggatgacagaagggctctatctcctgctgtgtgcccttgggcacaacttttccctctctgagtctcagtttctaacccttattggcaaagcagccaagctattctctgcgttgttagggtcattgtgaggtttggggggcctgacggaggcaaaacacttccatggagcctgggtgagtgggactctcaggggaggagaagcgggagagctgggccgtgggcctcacagcctgctctcccggcctctgtgttgcccttcagcccagagcctgaccacctgcgaggtctgcggtgcctgctttgagacccgaaagggcctgtccagccacgcgcgctcccacctgcggcagctgggagtggcagagtcggaaagcagcggcgcacccatcgacctcctctacgagcttgtgaagcagaagggtctgcctgacgcccaccttgggctgcccccaggcctggctaagaagtccagctcactgaaggaggtggtcgccggggccccccggcccggcttgctcagcctggccaagcccttggatgcccctgctgtcaacaaagccatcaagtcgcctcccggcttctcggccaagggcctgggccacccgcccagctctccactcctcaaaaagacaccactggccctggcgggctcccctacccctaagaatcctgagga

SEQ ID NO: 482634 - DNA, 1000 bp, Homo Sapiens
gatcccgacattgggaagtgagcaggcaggggcgccctctgggctaccaggaggaaagggtgggtgtttgtaggggccgttggctcagagaatgtgctgctcagtatggccaggtggaggaaggagggtgtggaccctccttcacaccccctggagccccacatgccagcctctcttcctgctgctttttgagacagggtctcactgtgtcacccaggcttgagtgcagcggtgcctccaactcctgggctcacgtgattttcccgcgttggcctcccaagaagctgggactacaggtggatatcacacctggttcacctttctattctttgatctagctatttcctgactttattttaaatctgcctattgttgatgtttcacagtcactcaatcttgtctcctgaccttatttcttttttacttcctttttttaagctgctttgaatcttctacttcatccctcctgtctatgatcatctatttttatttatttatttttgagacggagtctcgctctgttgcccaggctggagtgcagtggcacaatctcggctcactgcaacctctgcctcctgggttcaagcgattctcctgcctcagcctccctcgtaactgggattataggcaagtctcactacgctcggctaatttttgtacttttagtagagatgggtttcaccatcttggtcaggctggtcttgaactcctgacctcgtgatccacccgcctcagcctcccaaagtgctgggattacaggcctgagtcacagcacccggcctcatctgctattttaataaacatttccggccggacatggtggctcactcctgtaatcccagcactttgggaggccgaggctggcggatcatgaggtcaagagatcgagaccatcctagccaacgtggttaaaccccatctctactaaaaatacaaaaattagctgggcgtggtggtgcatgcctgtagtcccagctactcgggaggctgaaacaggaga

SEQ ID NO: 482635 - DNA, 1000 bp, Homo Sapiens; identical to SEQ ID NO: 309136

SEQ ID NO: 482636 - DNA, 1000 bp, Homo Sapiens; identical to SEQ ID NO: 309137

SEQ ID NO: 482637 - DNA, 1000 bp, Homo Sapiens
gatcagagggttggccctgactcagcaggctcagagccatatagcaacgtgtgcactctcatgcatgcacacccacacagacatacccacgtgtacacatatccacactagaatatacatacccacacatgcacacccacacatgtgcacatatccacacatgaatgtacatgcccatgcatgcacacccacacatgcacacacacgcatactcacacccacaaatgcacacacacaggcacacatccacacacaaacgtacatacccacaaatgcacacatgcacacaaatgtacacacccacgcatgcacacccacacccacatgcacacccacacccacatggacacacccacgcatgtacacacccacacacacatatattcacacaccaaaatgtacacaccgtgtgcacacacccacacaagcacacatatccacacacaaatgtccacatatccacaaatgtccacacatccacaaatgtacatacccacgcatgcacacatgcacacacattcacatgcatgcacacccatgcaggtgcacaccacatacacccgcacccacccacttgtgcacacccacaacccacacacacacaccgccatgggcagggaaaacccaaggctgcctcctgttcccggctctcgctgactgtgtgccctgggcaggtcccctggctctctaagcccctaagtctgcagcccagcaggtctggcccacctctgggggtggggactgagtgaaggccatcttgctggtagcccaggctcccagcatggcgcagtcactatccctgccctgctgcaggacaaacctgcctgggttatgccatctgagacctgcaaggggcagtcacttcctccacctgctcgagggacgaaaggcccgggcatctcactgctatgacccagaactttcagaggcaggtcgggccaggccaggccccggattcagaccactctcttgtcctagcacggcccagccatgctgtgtg

SEQ ID NO: 482638 - DNA, 1000 bp, Homo Sapiens; identical to SEQ ID NO: 309138

SEQ ID NO: 482639 - DNA, 1000 bp, Homo Sapiens; identical to SEQ ID NO: 309139

SEQ ID NO: 482640 - DNA, 515 bp, Homo Sapiens
tttttctaatttcaaaagacaaacctgtaaagaaattcttgaaagtttcttaactgcagccttcaaactgtctgatacttaccggtcttgtcggtttataacttgaaaattgcattaagaatgaaaccagaaaacaaaccacaaggactggtctgagaacatcaatacttacaggtaagatctggaaatttttaattttctggtgatgacacagtgtgagtacaaatgcctttggattactctggctgtcacggaggagaaaaagcctggggaagggaaaatagttgattgctaaaatattttaaaatctggaactaatcacacacacacactctcttacacacacacacacacacacacacacacacacacacacacacacacacacaggcttggagccacaatgcttcagtgcagtgctttggcatttaagtggcctctaggggcaacagcacaccaggcaagcaccaagacggtaattctgaattgtcattctccattggaaaaaagctggg

SEQ ID NO: 482641 - DNA, 1000 bp, Homo Sapiens
  misc_feature (294)..(294): n is a, c, g, or t
tgggggatgagccttgtaaaccagggctgttcccaaacctgcccacatggctcacttcctcaccccttggagaatagctcctgggcagtagcgcatgtggctgcataactgtggggaggaacgctggcgctgccctgttggcaagctgcggttctaacccatgtccttcmagcatcttagrctgggtgtggcccgagagagtcctggtggcctgataggcacttagctatcatccaataaatgytaatcatkttagtcatttcakackggcttcattctgtttcactactctwnagagaataagtatggactgacttttcaaatttattcctgaactacttatttttatttctataccacccatatataggagaatgggattgtaaatgaagctgatttcctaaaacaatcatctcccagcattggggccctcttattggccacattgttgatttgtcaatgtttcttttaaaaagacrtcccccagaaattgacccagaaattttcctgtctcctttgggacaaggcactgagaaggtctgcacctwacctgtctgcagggcttgaatttccttcaaggcattgacttctgtccagagcttttcaatttgagtcttcagatctccatccttgtctggggaaaattttagggtgggatggggtaggtggatgaaaagcgtatgattaaaataaaatcaagctttggaatgtaggacccaaggcaatagtggttttggtgaacctgagcccagtgtatacraaaaataatgcgtgaaaataacttggggctggcgaagtggctcacgcctgtaatcccagcacttggggaggccaaggcgggtggaccacttgaggccaggagttcgagaccagcctggccaacatagcaaaaccctgtctctactaaaagtataaaaattagctgggcatggtgttgaatgcctgtaattccagctatttgggaagctgaggcatgagaactgcttcaacttgggaggca

SEQ ID NO: 482642 - DNA, 1000 bp, Homo Sapiens
atcaatatactcaattagcatttccctgctgtataagccttatcaaaagatgaaatgagctgggcacaacttcagctcaatcagccccatggtcacatcagggcttggttctttttttttttttttttaagtatttactgtagttccaaacttcatcacttatactagccaaaaataaccgaaataaaaggtatctgaccattgactcaatcactgagtccaggttattttgctagacctagatcaaattcacttttagaagacaggaccagaaatttcttgctactttacaagcaaatgaacacgtgaaaaggactaaacttgaggcagctggaaaatatgccttgaaagaacagagatcaagtatgaactacatttactatgcaagagcagagtcaacttcaacgctctttgtttttgccttgttgagaaatgtgagactgagaaacaggaaagcaccatgggaagaagaaagtgctgtactaatttaaggtaacaattctcgaggtaaaataaggcattatagtaacacaattttcatgcctcagcaattaacaatgattttcgtttaattctcttccaactctacagacataattctgctttcaccttcatcacgctttcatatggttttaacaggggatacacctcctcttctaagaatctctgcacctgccagaggaaagcaaatacaagacaaaagaaaatgttaagatattagcagataataccttttccaatgtcaggggataccactgaaacctaatttgatgaagcttttactccaacactgagcttgttttcctcaactgcctatcaggaatttctgcctagacacagatgattcaaccaccatgcccacatgctcaccaacctttcccgcaaactggcccagcctgtgttctctcaggtggtttcaccatttccatccaacctaaaaatcaccacagcttctttcctcctgcttcccagccctcttcaagtagccaccaagagctta

SEQ ID NO: 482643 - DNA, 1000 bp, Homo Sapiens; identical to SEQ ID NO: 309140

SEQ ID NO: 482644 - DNA, 1000 bp, Homo Sapiens
cagcagtgattctttccttcagtgtttcaaaagtaattggaaacaacagtcgagttgtaggtcattaattaggagccagagagagctccatttgcatctcagtaatgctctacacctttatttcaacatttagctttaggtttaaaatatttgctaagatagtgcagaggcgattaacagagatttcatttaaatgtgtgctgtagttacacactccatccacaggaaaagaaaactatacagcagaagttacaaaatggttattttgtgtttcgaaaacattccaataatcccttcactgtggtggtattcattcaacagtagaaaagcaaaacagaaatgaacacgagcagccggctcgtttccatctcaaagagaacctcgaggaacgcatcagctgcagtttgcgcctgggaatctcagcgtggaaatcttcccagtcctccttcgagggcaggaggagagcaggaagacacactgccactcactaggggaccccagatgtcaccccggccccaggataaattcctccaggtcgcatgtagaactccaaatattcccagctccccccaaaatagacgttgactctctggggttagcatcggttcctagtgaataacttaacatgtctggttgttaagttgtttcttttaactcctttctctgaaattagctagagctaccagattctagaagagctcggccaccacgtggatacgatgtcattttgtagttttaaaatattttcactttattattatgcttataatattattccaacagactgtattaaaggcagtgatcactaacacagaacacgacagggcgaagaggcagccgggccgattgcaggacgtggcctgtcgggccagggtcgctgacatgcacgctggtagctcatacactgctaccctcagcacaggctgcaggaatagggacaagacagatgccgccggactcttagaagctatttaataaatatcatccaaaaacaaaatgg

SEQ ID NO: 482645 - DNA, 1000 bp, Homo Sapiens; identical to SEQ ID NO: 309141

SEQ ID NO: 482646 - DNA, 1000 bp, Homo Sapiens; identical to SEQ ID NO: 309142

SEQ ID NO: 482647 - DNA, 1000 bp, Homo Sapiens
gtgtctgagctgcagagaatggcaggcaagcctctctgccctgtgcctggctcacacccatggccccaacattgaacacctgctcccctgggtcagccaggggcaagggttccagggtgtttggccagcatggggtgctggcttaggaggaggtgcctggcagaggggcctggtggagggtgcaggggcctgaggtgtcctcagcagcttctccttcagcccaaggagccccccttgaagctgaacagtctcgccttgactaagcttttctcttgggccgtggctgtgaatctgatgtccccacatattctggcccaagcaacccccaccccacacttgcccccccactgcagaggatcgaggaagtggggggaagagagaaggcacccgaggaactgtggctggagagccgcctctcatccccacacaggttttcatttctacttagcccaaccaatcagtgcccagtgaccatgggacaaagatgaccaagacccagccttgggtcttttacacctcactgttggagggtgaggtcgtgatggagcgagagacgctctagggaggtcccctcgttccgttttagggactgacccgagccgtggagattctgtgaactgtagaatggtttttaccacctacaaaagtgccttgggaaacaatggcttttctttgaaggcaacagcttccatctgatacttaccacttgctgtccctctctgatcgcaaatgtttaggaagaggtgtgtgggggtgtcgtcacagcctgagaattgctaccttgagtagcagggagctctgtccatctgccaacctggacgtgagcacagccagagaatagaaggggtccgctcatcgctgggcaggatggggaaatccaccctggctcctggactgagtgcatggctggttcaatggctgggctgatgtgtgggtgtgggctggagtcttggggatggggtggacagggtctgtctgtggctgtgggtgttctccacct

SEQ ID NO: 482648 - DNA, 1000 bp, Homo Sapiens
tttttagttgtggtccaatttattattcttgtcagcaaatacaacattattgagaattcactaaatgcacagtaagataatatgcaaatggatttcaaacaaaagtggattgtactgaagacacaagaatatagaagaaagcttctgaaagataaggcaatattatgctaaacaaattctttactgatttgacatacattttgtttactgggcagcaataattatcttttgcagctcatttgggagaaaaataaaccccataattccaggtttagaggctcccataaatgccagtcgattgccatatttggactatatcattttattagaaaacttaggggattttaatagaactgtatgaaagtgggttgtctttttcaggtttctgagccaacacctgctccctaccagtaggtccctatttgctataattactgagatagaagattttgctattaagctttcatgcaaattcaagcacacaaagaagcagtagtactgtctcgtacattagattcagtagagtgaagtgggtcccgagccttatttaatccttttctaaaagaacagacaactttttgggagtaattactataagttgtgtcaatctacagaaacaaatgtatattttgctgtgtgtgaaggagaacagcagcagaaagcaacccaaaccaaatataatatctagtaaatacatagaggagaaaaataatcctaaatgtatgaaatgtttttctattcagttatctgaaaaagccagggcacctttgcctttacaaatgaatatacatatacatatttatgttgtatgtgtaatggtgcatgtgtgtatacagatacatacactcatatagataatttataatctttgaggacttggcagctggggtggaggtagggtctttccagaaatattaaaaaactgtttattaatttttaagccatgaaggatttgatacttatgccagataaatccctagggatgtatcaaatcacacac

SEQ ID NO: 482649 - DNA, 1000 bp, Homo Sapiens
tttttattgaatcttttcctggctgttagctaaaaaccttatctaaaacttggggatgtgtgatgacagaacttccaaagaatagacattgaaatagatgcatagcggagcattatctagtaccaattaatttatttttgtataggttatattccaaaacacagaacttatgactgggggatcttgattaaataatttattaatcaagatctttcagaaaaaaattcataaggaagtgaggacagcaggaaagggcaaaggaagaagctagataaaaatgtagtttcacaaatgtagcctcagcatgatttctctgggagatctggagcttagattaatcacggaggtgattcttcccagaaattagagggttgggttgtttgtcttagaccagtggatctgcccagggaaggtggagcatagcctaccagacattactaaacaaggtgctcaggtcagacaaggacaattctctggagaagtgcaggtgtgaactgttatcagtcaattctcgaagctggggtatgggtacacctccccactcagtgcaatttggatagagaacaaatatctactacaattcttttctcacaactcattatcatttaagtaatttcagcttcttaaataaatttcataagaaagaaggaaaagtttatttgcttgatcagtgactgcaagcaataactccccattggcctaggcctccagataatccaactcatgatcctggctttgctttgtttccttctgtggctctgtaagtgatttcatccattcccataataggagttcagaagaagaaaaatccttttgagtcagcaggaagctttcctgttttagaaaagtatctccagaggcagttgggtttttgtcagctgtttgggtgtttattatcctgatgctgcttctttttctctatattaataagcagttctgttttgaaaatgttggagggcttccagatcttggttcagaatacagtacaaggaacaattca

SEQ ID NO: 482650 - DNA, 1000 bp, Homo Sapiens; identical to SEQ ID NO: 309143

SEQ ID NO: 482651 - DNA, 289 bp, Homo Sapiens
aattagctgggcctgttggcacacacctgtagtaccagctactcgggaggctgaggcagaggaatcgcttgggttgcagtgagccgagatcgtgccactgcactccagcctggcaacagagtgagactttgtctcaaaaaaaaaaaaaaaaaaaaaaaaaaaaagaatggtgtcaaatggctacaaaatgtcaacattattacttatttagctgtgagtaaaatcatacttttagcaatgaaaaaaaatctatcaccccaaatacaactttacagtggagaaatcctag

SEQ ID NO: 482652 - DNA, 1000 bp, Homo Sapiens; identical to SEQ ID NO: 309144

SEQ ID NO: 482653 - DNA, 1000 bp, Homo Sapiens; identical to SEQ ID NO: 309145

SEQ ID NO: 482654 - DNA, 1000 bp, Homo Sapiens; identical to SEQ ID NO: 120038

SEQ ID NO: 482655 - DNA, 1000 bp, Homo Sapiens
tggaaggttaagagggagcagatacttcttacacggtaggagcaggagcaagacagagacagggtaggtgccgtacccttttaaacaaccacatctcctgagaatgaactcaccatcgtgaggacagtactatattagtgtgttctcatgctgctaattaagacatacccgcgattgggtaatttataaagggaagaggcttaatggactcacagttctacatggctgggaaggcctcacaatcgtggcggaagacgaaggcagagcaaagagacttcttacgtggtggtgggcaagagagaaggcttatgcagggaagctccctttataaaaccatcagatgtcgtgaggcgtattcactatcacgagaacagtccaggaatgacccagccccatgattcagttacctcccaccaggtccctcccacggcatgcggggattgggagagctacaattgaagatgagatttgcgtggggacacagccaaaccatatcaagtaccaagagggatggtgccgagccattcaggagaaactgccccatgatcaaatcacctcccaccaggccccacctccaacactgggggttacaatttgacgtgaaatttggatggggacacagatccaaacgatatcaactatattaactatgtttttgaaataacttagtttcacagcagaatgcagtttttgaagaattaattgttttaggcagcttgagaataggattctttgcatgcctcccagatatatccctgtgtgtgcatcccaccagcattttttcttcattataccagaggtatctaagggatttcgtgaaaggtagagtctctgttacttctggttatgtgtcatatattttcttggattatgctcaattcttctctaatctctgatgtttgaataaaatagtcctgggaaaagactttcaatggttttttagctgtagaaagattaaatactcgttttggaaaaacagttgacgttctttatttctctg

SEQ ID NO: 482656 - DNA, 1000 bp, Homo Sapiens; identical to SEQ ID NO: 309147

SEQ ID NO: 482657 - DNA, 1000 bp, Homo Sapiens; identical to SEQ ID NO: 309148

SEQ ID NO: 482658 - DNA, 1000 bp, Homo Sapiens; identical to SEQ ID NO: 309149

SEQ ID NO: 482659 - DNA, 1000 bp, Homo Sapiens; identical to SEQ ID NO: 309150

SEQ ID NO: 482660 - DNA, 1000 bp, Homo Sapiens; identical to SEQ ID NO: 309151

SEQ ID NO: 482661 - DNA, 1000 bp, Homo Sapiens; identical to SEQ ID NO: 120039
  misc_feature (156)..(156): n is a, c, g, or t
  misc_feature (320)..(320): n is a, c, g, or t

SEQ ID NO: 482662 - DNA, 1000 bp, Homo Sapiens; identical to SEQ ID NO: 309153

SEQ ID NO: 482663 - DNA, 1000 bp, Homo Sapiens; identical to SEQ ID NO: 309154

SEQ ID NO: 482664 - DNA, 1000 bp, Homo Sapiens; identical to SEQ ID NO: 120040

SEQ ID NO: 482665 - DNA, 1000 bp, Homo Sapiens; identical to SEQ ID NO: 309156

SEQ ID NO: 482666 - DNA, 1000 bp, Homo Sapiens; identical to SEQ ID NO: 309157

SEQ ID NO: 482667 - DNA, 1000 bp, Homo Sapiens; identical to SEQ ID NO: 120041

SEQ ID NO: 482668 - DNA, 1000 bp, Homo Sapiens; identical to SEQ ID NO: 309159

SEQ ID NO: 482669 - DNA, 1000 bp, Homo Sapiens; identical to SEQ ID NO: 309160

SEQ ID NO: 482670 - DNA, 1000 bp, Homo Sapiens; identical to SEQ ID NO: 309161

SEQ ID NO: 482671 - DNA, 1000 bp, Homo Sapiens; identical to SEQ ID NO: 309162

SEQ ID NO: 482672 - DNA, 1000 bp, Homo Sapiens; identical to SEQ ID NO: 309163

SEQ ID NO: 482673 - DNA, 1000 bp, Homo Sapiens; identical to SEQ ID NO: 309164

SEQ ID NO: 482674 - DNA, 1000 bp, Homo Sapiens
ttttttttttttttttttttttttttttttttttttttttttttttacaatttaagaagcctcatgtttattaactgatttacattttattatctgatttacaattgataaagcaaaggaaggtgcataaagagtgacttgacaaagttgtgttccagatatgacacaatagcattttcctggagcccccgggatcccatgcctagggccacacttggcagtggactagtgtgcatgcctgcagtacactacaagcacaggtctgtacacacctgacagcagacaaggccccagacggacaaccctaactccagatgtcaagctgatgtgagaaccacccactactaattatgcactaggggcttggaatactgtgtaaaatgtgccttcaacagatggtaggctctagtgagcttctctaacatcttctcctggcagtctgatcacttatgtcagaccaagggcaagcacaagactaaaaaataaaacccacttaactaccaatggctatttacataagattttggatcttcaaaaattcagggcaattttaattctgagctcaaggagactctctgaataggtaacaggctacttgaaagtacctgagaaatcatcacagaaaatcttgaaggaaaaaacagttgagttttcccaggcaagcatgaaagtacataccagctgactctgaatgataacaaaaacaaaacgagaacagttaagagtcctgtggaggaagaacttactggaaagttccagttcttgttatattttgcagatagtcccatggaacagattctcaggctgtacccaaatcatcttaggtggaaactgaaagtcagcaaggcccagctttagacaggattcatttcagcgacaaacatgcacaggtacaatttgttctgacagaacatcaggatcaatttaattttcaaaaacgtaagtttggctttctttaattggccatattcatctggcttccaaggcaaaactctgcttc

SEQ ID NO: 482675 - DNA, 1000 bp, Homo Sapiens; identical to SEQ ID NO: 309167

SEQ ID NO: 482676 - DNA, 1000 bp, Homo Sapiens; identical to SEQ ID NO: 309168

SEQ ID NO: 482677 - DNA, 1000 bp, Homo Sapiens
attttaggtgtgagctcactgtcgcccgcccaggtatggttcttgacacaaggtcacaatccccacctttacaggtcccgtaccgtgtcaggtcactctcccagacccaggaaagccacctcatccctgctggaagctgttgtccaaggcaacagaggaaggaaggcacgaggaggaggggcagtgctgagtttaagttaaacacccatatgaatttattaaatccagactgtgttaaagggcggcggtctaggagggggagtgtggtagggggacgagggacaagatgatgaacggccgtgggcatcccgtaggggggcccggccccacccccgcccaacccaccccctcggcaacgctgcatcagcttcaccatgattcccagtggtgctgggctggcagggcgagatggctggaaacacagagggacagagggacagacagcgcctccacaaacaaaccctggcctgccccggcccctacatcacacgctgggccctgacctgaggcgggcctcccaccgccccggcctgatctgtccagggaaagggcgacagggaggggaggcgagggggccgggacgcaggggtagtggtcgccaggagccggagcaggtgaggaccagtctcgactaatcctttttcttgtcctctgctggctttggaggggcttcctggggctcgctggcagagctggccccctgggtgggcttggtgggcagggacgtggaggcctcctccctggtggcggtggtcgtggtgggtgcaggtgtgggcgtgagggcccctgctgctgtgggaacctcggccacgggggcggcagctgtggggtcttctccactcatgccaaactcgttgactcgggtggggtcgacgcggtagatccaccgttggtagaggtagatgaagaaaaccacatctggagaggggtgggaggcagtgtgaggtcgggctggcccgtccacagccaggtgggcctgggtggagagggcgtgatgcaa

SEQ ID NO: 482678 - DNA, 1000 bp, Homo Sapiens; identical to SEQ ID NO: 309170

SEQ ID NO: 482679 - DNA, 1000 bp, Homo Sapiens; identical to SEQ ID NO: 309172

SEQ ID NO: 482680 - DNA, 1000 bp, Homo Sapiens; identical to SEQ ID NO: 309173

SEQ ID NO: 482681 - DNA, 1000 bp, Homo Sapiens; identical to SEQ ID NO: 309174

SEQ ID NO: 482682 - DNA, 1000 bp, Homo Sapiens; identical to SEQ ID NO: 309175

SEQ ID NO: 482683 - DNA, 1000 bp, Homo Sapiens
  misc_feature (236)..(236): n is a, c, g, or t
  misc_feature (270)..(271): n is a, c, g, or t
aagcttccaggtttcaccctctgcctcttagtctctctgcactcctgcatccccaagacatcgcacatgcacatacacacacaggcacacacacaaatgcacacacgggcaaacacacgagcatgcgttctctctctttctaaaccaagatgtcagggactatccatgctccccattccacagatgaggagacagaagcccagggtggacagggggtgctctcactaccaaccagnatcttagtgacaaagcgaagacagactataggtnntgactcccaggcctgagctctcttcaccccactaggcgtccttcccaccagaccaaccagatccgctagcgaggctgagtcctccccagagctctcctacaacacccaagcagcttggcacccctggctgcctccccatccactggccgccctaggagctcgggctcaggtcatcctaagagccaagccctaactcctccaagtcccagggacagctacccacaggagccccccaggctccccctgtcctttttcatcctggactccccacattccccccagctctgaccccacccctcagccctgctcctggacgccgggccatacctctgtgtggtgggagagaccagtcttcttctggagcctctaggcagagtgagcctcccacgtttcctatttatgttgatgtcatcaggaaacagagaagcagaaagaggaagcagtgccggcccaggcctactttgctaatagtgcacgtgacttttcttacttccagaaagcctcctactccaatttaccttcctataaactcctaggcctccttcaagcctcagctgacgcagggcctcctccatgcagccttcctgactgcttgatggggatgcaggtggaagtggctgcaataaccatagctggtttgagcccagagccagacagatctgtgttggacttccaagtccactgcttcttaaagcgtgtccttgtgcaaatcatctgcgtgttacttcc

SEQ ID NO: 482684 - DNA, 1000 bp, Homo Sapiens
ccttcctcctccagctttattggaatagtttaaaattacatttctattttctaggacttcagttgctctttccatctgacttttaaaaactgattacagcaaatgaaacacagttgtctaagtgatatagtatacaaaaataacatcttgatttctgtgaaaatgcatttctctgcaattcctgaatagctccaaattatgctaactctgagcattgatgtttactctgggttttagatttagtctttgaaaataatgtgttctaaacctttgccatcaccatctatgtgtccaacatcaacactgtgatgaagttgttcctgtttaggcttttattccgatttctctcgaacagccattaacacgcatgtttatctttttgtttactcccactcaactgtatgttctatgtagggcctgatacagatgttacttgatgttatttaatagctactgaggtcagacaatccaagaccatcattatactaaaattaaagttatttatggaagttcatagacacttccagaattggttttacctcctacatgggaacatgttcaaggaacccaggacgggcttactggtctgactcaactcttcccattcatcaatccctattcaccagtggcacggaaagggggttctttaacaaagcattatacataacacctctaccaaactaaacataaactttttttgtagttaaatgcagaaagtcggtttttttccacccctttcctccttttacacggcaagtaaagctcactggcctgggagttgcctctatctgccaacctttggccagtgaagaggattcagagaaaataatacaaccatcaatcagaaaaaggaggggcgacaaaggaaaataattaggctgtagcctcaattgtgcattcccgtgcaaggtgccctgactcgccacagcggtaacagttgacttcacttgtcttgctgcagttgatggctacatgaccagtttcaccacacctaaaaaag

SEQ ID NO: 482685 - DNA, 1000 bp, Homo Sapiens
cccttcataggtgctcaaattattcgccagttctctaaatagcagttctcaaaattttggcataaggcattattatacccttacatatatttgagggcttcatagggcctttgttcttgggggttatagctatcattatttgatgtatttgaaattgtaactggtaaatttgagaaatgttaaaaatattttaacataaaaatgcactgcatgttaacatagataacatttttattttaaaaaactatttttttaaaacaaaaaatactgtgaaaagagtggcattgtttttatatttttgcccatctctttcatgccaggcttaacagaaactcatacctgcttgtgcgtgtagtctgttgcaatatcacatatcatgtaacctccggaaaaccccactgtatgcatgtgagagaaggcgaatcacatgttcgtgttgttataaaaatagtgttaactttgtagaccccttgaaagggtcccaggagcccccaggaggttgcagaccctaaatagtgaagggcagcatctcttcgttcctctcagggcctggcacaaagtgagttctctgaaagcatttgctgagtgaatcgggcagcagggtactgggtttttgggctgggagtagggacttcttcctccctggaggccgggagaggctgtggaatgcatccccgacaggatgggtttccatcctgaaaatcagcaggtccagagaggactcctgggtggagggcacagcaagggatgagacgcgatcactgtatcatggccatttccactgggctgggctctgctcacctgcctggcgctcgtccccagcacctctgctgcagatcataacacagctctgctgttgccttcacagggaacccaccaagaccaacctggtcacattcttccataccgacctcagcggttacctcccacagaacgtggtggactccttcttcccccgcagcatgacccggttttatgccaaccttcagaaagcagtgaa

SEQ ID NO: 482686 - DNA, 1000 bp, Homo Sapiens; identical to SEQ ID NO: 120044

SEQ ID NO: 482687 - DNA, 1000 bp, Homo Sapiens; identical to SEQ ID NO: 309177

SEQ ID NO: 482688 - DNA, 1000 bp, Homo Sapiens; identical to SEQ ID NO: 309178

SEQ ID NO: 482689 - DNA, 1000 bp, Homo Sapiens; identical to SEQ ID NO: 309179

SEQ ID NO: 482690 - DNA, 1000 bp, Homo Sapiens
atctctgttgctcaatcatctgggtcactgatctctgaaccctggccagggtccccggggcctgtgccaagggcggtgaatgcttccctccaacacaccctccgccaggttttcctcatgctgctgccaggcctctgtcatagctgcggccctaaggctgccttacccagctgcctggcctggccatgggctgttgcatttgagtttttcaggggcagggtcatgttgaatgggagcctgtgatgcactcccagggagcgaggctcccctggcatcaagctcagctgaaacgtgagaggtgcgctctggccctgggctggagtaggcaacaagtgcctgggctgaccccgtgacaccagcctcatcaccaggatgcgcggaggatccctaaggacttatgatgactgcttctctgccactggtctcctcattcactcagctctggccagccctctgtggcatatttccaaagctcagctctgccgaggtcccctgctgctcacagagctttgtggcttcctgtggcccacaaggggaagtcgaggctcctaaccttgaccttcaaggcctctctggctttgtgtcctgctgctgtccccttgccatggtccagacacctgaggcccctcctaaggaagcttctttgttactcccacttccatactttcatcctccccgctccctctgcctggaattccctccctattttctttctatgtattcaagtcatttgagtgtttctttttctttttcttttaagccaggtcctccctgtggtgcccaggctgcagtgcagtggcacgaccatagttcactgtagcctcgagctcctgggctcaagcaatcctctggcctcagcctcctgagtagctgggaccacaggtgtgcaccacctcacccagctaattaaaaacatttttttttttttgtagatacagggtctccctatattgcccaggctggtcttgaactgctggagtcaagtcatcctcccaccttg

SEQ ID NO: 482691 - DNA, 1000 bp, Homo Sapiens; identical to SEQ ID NO: 309180

SEQ ID NO: 482692 - DNA, 1000 bp, Homo Sapiens; identical to SEQ ID NO: 309182

SEQ ID NO: 482693 - DNA, 1000 bp, Homo Sapiens; identical to SEQ ID NO: 309183

SEQ ID NO: 482694 - DNA, 1000 bp, Homo Sapiens
tttttttttttttttttttttttttcaggcccgcagccccactgcctgctgttggaagaaagctgtggaaagaaagcaggggcccctgccccaggccaaggccctgcccttgccacacacggtacacacatgcagcctctctctctctctctgtccactgtgaaaataaactgcaggcctggctggacaacaaagccagaggcacagaatctggaagacatctggtgtggagacctctctattgcacacaacgtcccagcgcactccactctccacccactcctggggcctctctgtcctcccttccttggcccttggtcattcgttattcctggctttggtccactccgaggtcctccttagctgccagtcatcacaggggatggctgcctccacactgcctgctccagggactcgagtccactccacggagagccttgcccagctgtggccagcctgtgagtatcttggcccggcacaccctggctttcccggctgcaagtgcctgctccagctccagtcccagcccctcctcatggctccagctctcgggacaggcgggagagttcccgctggttgtcaatgaccttcagctgctggacataagcccaggtgctggctggactccgggtgctcagggactgctccgagcatgtggaaatcctcgccacctggctgtcctcgtggaggtgggaaactcggcttctgagtggtgagagaggcacagggttgtggcttcggcagtggtgcagcatccgcgcggctctggccatcattctcatcttctcaaagttgatgagattctccactagtgtgtggtttccctcatgaatgaaggtcatgtctttgagaagaaggggcatgaaggggatgacaggaggggagagcttggcgagggccagtcggtatacccggtggttccatgagggatccagcagcctctcgagggcggagtacagcttccggactttgtgaggcagccgctcccaggtgtgggcta

SEQ ID NO: 482695 - DNA, 1000 bp, Homo Sapiens; identical to SEQ ID NO: 309184

SEQ ID NO: 482696 - DNA, 1000 bp, Homo Sapiens; identical to SEQ ID NO: 309185

SEQ ID NO: 482697 - DNA, 1000 bp, Homo Sapiens; identical to SEQ ID NO: 309186

SEQ ID NO: 482698 - DNA, 1000 bp, Homo Sapiens; identical to SEQ ID NO: 309187

SEQ ID NO: 482699 - DNA, 1000 bp, Homo Sapiens
catcgtgatgtcttatttaaggggaacgtgtgggctatttaggctttatggccctgaagtaggaaccagatgtcggatacagttcactttagctacccccaagtgttatgggcccggagcgaggagagtagcactcttgtgcgggatattgatttcacggaggatggtggtcaagggacccctatctgaggggggtcatccatggggacgagaagggatttgactgtaatgtgctatgtacggtaaatggctttatgtactatgtgctgttaaagatgggtaggtttgttggtatcctagtgggtgaggggtggctttggagttgcagttgatgtgtgatagttgagggttgattgctgtacttgcttgtaagcatggggagggggttttgatgtggattgggtttttatgtactacaggtggtcaagtatttatggtaccgtgcaatattcatggtggctggcagtaatgtacgaaatacatagcggttgttgatgggtgagtcaatacttgggtggtacccaaatctgcttccccatgaaagaacagagaatagtttaaattagaatcttagctttgggtgctaatggtggagttaaagactttttctctgatttgtccttggaaaaaggttttcatcttcggtttacaagactggtgtattagtttatactacaaggacaggcccatttgagtattttgttttcaattagggagatagttggtattaggattaggattgttgtgaagtatagtacggatgctacttgtccaatgatggtaaaagggtagcttactggttgtcctccgattcaggttagaatgaggaggtctgcggctaggagtcaataaagtgattggcttagtgggcgaaatattatgctttgttgtttggatatatggaggatggggattattgctaggatgaggatggatagtaatagggcaaggacgcctcctagcttgttagggacggatcggagaattgtgtaggcgaata

SEQ ID NO: 482700 - DNA, 1000 bp, Homo Sapiens
gtgttgtgttcatctaatcttagtattcttttaattacaaattgacctcacagcttgaggtttcttgtgtcttattctgtggactacctgtgctcctttgcttcccctcccctcgcataataactatattaagaaattttttttggccttgagttggctggaaaaaaaatataaaatttaaaaaatttaaaaaaaaagatttgcaaaatgtaagtgtagatcatttgaacaagcaaaattaaagtacccactgggggaaatgtgtctgaatcttactcttctggatctgcaggattagggcttggaagtatgtcaaagatgcagggagtgtcaaagtttaggaagattgtagagctgagagcaagaagcagaaatgagtgagtcaaagaagggagtcctaatacatcaccagatctaggaggggagaggagacagacagaagaaaacaccagaggcaagaactgtagaaggccaggtttctgagaatgaattgagcggggtgtcctgagcagtttggaaaaggagtttttgatggtatggtgtaggtgagggctggctgcataggaaggactgaggttggaacggacatcgggaaagctgaggggcagtgaggtttactacatgggaaaaggactcttgaaacgagaatcagtgttgatgtcagggtgaactttgtgggtacattacttggtgttaacattgttggcagtggtagcccttttcagaaagcaacttgctgtaagtcagggtgtccgttccaaccttcagctagtgaaaaggtagtaacaaatggtaaacaagagaatgattgtttaaacctatctgtggacacttaatgcaactgtttaaaaatgataatcacgagttatgtagcaacgtggaaatatatttacagaacattaagtggagaaagcaggacacgaaagtatatttatactacagttatactcaacagttcattatatgctgttcatttaacagttcatttaaacagctcatt

SEQ ID NO: 482701 - DNA, 1000 bp, Homo Sapiens; identical to SEQ ID NO: 309188

SEQ ID NO: 482702 - DNA, 1000 bp, Homo Sapiens; identical to SEQ ID NO: 309189

SEQ ID NO: 482703 - DNA, 1000 bp, Homo Sapiens; identical to SEQ ID NO: 309191

SEQ ID NO: 482704 - DNA, 1000 bp, Homo Sapiens; identical to SEQ ID NO: 309192

SEQ ID NO: 482705 - DNA, 1000 bp, Homo Sapiens; identical to SEQ ID NO: 309193

SEQ ID NO: 482706 - DNA, 1000 bp, Homo Sapiens; identical to SEQ ID NO: 309194

SEQ ID NO: 482707 - DNA, 1000 bp, Homo Sapiens; identical to SEQ ID NO: 309196

SEQ ID NO: 482708 - DNA, 1000 bp, Homo Sapiens; identical to SEQ ID NO: 309197

SEQ ID NO: 482709 - DNA, 1000 bp, Homo Sapiens
gatctcttgaacctggaggcggagtttgcagtgagccgagattgcaccactgcactccaggctgcgtgacagagtgggggaaaaaaaaaggcttgaggccatggctgggtgcggtgcctcacgcctctaatcccagcactttgggaggccaaggcgggtgtatcacttgagcctaggagttcgagaccagcctgggcaacatgacgataccctgtctctactaaaaatacaaaaacccaggaggcagaggttgcagtgagttgagatggcaccactgcactgcagcctgggcaacagagcaagactgttgtggatggacagatgggtagatggatgagtaggtggatagatgggtaggttggtagatgggtgggtgggagggtggatagatggatggatggatgggtgatcaatggatggatgggtggatggataggtggatgggtgggtgggtggatgggtggatggatggacagttgggtgggtggatagatggatggctgcatgggtggatgatggatggatgaatggatagatgaatgaatggctaggtgatggatggatggatggatgggtactgttgggtgcatgggtggagaatgggtggatggatgatgggtgggtggatggatggatgaatgaatggctgggtaatgaatggacggatggatggacggttgggtgggtggatagatggatggtaccattgggtgcatgagtggatgatggatggatggatagatgaatgaatggctggatgatgaatgggtggatgatggatggatggatagatgaatgaatggctgggtgatgaatggatggatggatggatgggtaccactgggggcatgggtggaggatgggtggatggatggatgggtgaatgaatggctgggtaatgaatggatggatggacggttggatggatgggtaggtgggtagatgggtgggtgggtgcatgggtggagaatgggtggatggatgatgggtgggtggatgg

SEQ ID NO: 482710 - DNA, 168 bp, Homo Sapiens
gatccactccctggcctgagctgacatttctttgaacctcagtggtctcagatgttcccaggggagagcatcttcccatcttcagagttacttcagagttaaggctgagttaacttaacctcagcaaagtaggcagatgttcagatgagatttcttctagcccagatc

SEQ ID NO: 482711 - DNA, 1000 bp, Homo Sapiens
ttycctcaatttgggaaatggaaatgatttgratcatcccctctattagggtgggagaatacccagtaaggcccttggggtagtgctggcgggaggtctgcaccagttttttgcacacacagggatgacacgacttgtctgacacggtggcacatgcggaggctcttccccacttcccagscgttctctcatcccccmkcacgccacacccatggacactggctaccttttcggcagtagtggtctggtggatggccagcagtgaaagcaggacgagaactttgctgcaggtacggacaggccttgggggcttcatcgtggctccagtgtctgccaggaggcttctgaacgcgacagcaagtggggaatggattagtaacttgtttcctgccccacccacatgggggcaggttctgggaaattgggatctacaagccaaaaaccacagtgacctcagataagcaaatgacgaacgcccatggaccttggctgggggcaggaatgtataccaaagaagggtaggctcagtttggagtgggggtacgtgccccttctgaaaagtgcgaaaccttcaccaggacccttcacaccaggcattccaccaagctccacagggctgggagggaattgacagtgaagatgtcagtctgctctccctaagtccagcccggggagaaacagcgggggatggtggggaagactagggctacagggctaccctagcggcttcccggaagaagggggcttgcgcacacgggtaagtgtgactggctgatgggagggcccaaaggcatggagtgactctgggaggtgtctgtgtggggcagatctagagtcaggatagatacgccgtatttctgaagtgagaggtgctgggcacggggcgcctccttctctctcctggggtcccaggttgctgtttgggtgccattaatctagccagggctttaggttcaaccccagcaaggcccccaaaacaagaatggcaatacaactgagt

SEQ ID NO: 482712 - DNA, 1000 bp, Homo Sapiens
tttttttaatttaggtttgttttatttaagtttaatgttaattccatgctgtgtttcagtaagaacaatacagattctgtatctgtggctccagtcagatatccagtagtacaaattagcttcaagttacacatactgaacaaaagaggttgagcgagcgaaggaggggaggagtgaggggaaggaggtagggggagggggaaggagaagaaacaaaagaattgaacaggcatgcaggcttttccataccaccttcaacagctaacctgcttcagtgggagagtaaagtaggcaagaatgagcagccacggattgttgaactgttaccagcaccatgcttttcagcaacagcaaaaccattacaacgaagtccctccccaaaccacctttaaccatctcaagctaacacccaattacttgcaaacactggtataaaacacagtttaaacaattagaaaaatgaaaactgataccacttattgcctctatagtgtgattaacctctctcttagatgcttgcatcacctataagtctaatggctttcaaatgtaatttccatttgctaatggtgatcttgccacatctggcacggagacgacacagtaatgctgaaaaagcctctatgtagtcctgttagtgtcttaaagaacctaaaagctgggaccagtaaaatccacagaaattcactcttgcctttaagaacttttgaaaactgtttaaaaaaaaaaaaaaaaaaaaccaacagggcaggaacctaaattctgagaccaaatgtaaaagtcagatttggtggttctcagtgacaatggggagtttccaaagggtgggatggggaggagggggtggtcagagatggtttctcttgttggcttatgtctcactgattttcgtcttccacgtcctgcagcgcttctttattctgctcttcaccgtcaccctgcatgtctgaagtccatagtgtcagattatcacgtaacaactgcatgataagtgtagagt

SEQ ID NO: 482713 - DNA, 579 bp, Homo Sapiens
ggcaagcggctgggctccgaccgggagcggcggctccatccaggcggcctccgggctcagcaggacagcggactgcgggccgatccgacgacactggctcccgcgtccccacacccacccacctcggctgcgtgtcgtttgaggaacagctccgcgccgggcgccgggcgccgggagccgggagcggggagctgggagctgagaatctgacccaagagagagcggcgcctcgcgcccgccagttttccaggccgccgcagattccgtcccctgcggtcaaactgcggaactgcagcgagagacctgacggactgggggcgtctctaccaggtccagcaaggaatgggttttaaatgccacctgtgacatcaaaattgttctgaggactttgaaggccacagaaacaaaacacagtcatacctatgggagatctcaaacctgttgtgtcaatacgacccacatcattcagtaaaaaaatacatatatatatatatatatatatttcttaaggttataatgtcccgtgttggttatcctaccatttcctttcctcttctttcttccacgccctaaatcgga

SEQ ID NO: 482714 - DNA, 539 bp, Homo Sapiens
gatagagacacaggcttccccagtgctgggctgtcactgactcagtgccaccctccaggcctcttcagccctgcccttggcacgagatcaagctaggttccatttctgctgtctgcgttctgtggccaagcagacctactgaatacctgagatgaccagggaaatgacttgtagctcccttagggctaaatttcaacaacctgacaggaattaagttctgtggcctttaagtgggggctataaatgcctatctgactgggcagcttcagctcaagagaggcaagagaaacaagagtatgtctagactgtacagcccccacctgcacgcatgtggtataaaataactgtgttcataccagacacatcggagcacttttgggaatccaccattaaagcatcaaatacttcaaagtcagttttcttcacttgaatgatgttgttaactgtgccaagctggctggttactatgggctgggaagagacagataggcagaaatcataacgtggaaggtctgcggagttattcttcagaggacttg

SEQ ID NO: 482715 - DNA, 294 bp, Homo Sapiens
  misc_feature (242)..(242): n is a, c, g, or t
  misc_feature (244)..(245): n is a, c, g, or t
tacatctaggtttctctacgtttctcaagtacttttctcctcctgctttcttttttttcttttcacttttgctgtctcttgacaaatccatcacccaccctctactttgccctctgttatgggtctttctcattcctttctccgtctcagcttttctactgctctgtctcccaatcctttggccgacacaatcacaggagggtttggataagacgcctgcattccggaggagctcgtggtcngnngctgagctggcagcaagaacaccccgtgtcacaggacaggccccgggta

SEQ ID NO: 482716 - DNA, 1000 bp, Homo Sapiens; identical to SEQ ID NO: 309199

SEQ ID NO: 482717 - DNA, 1000 bp, Homo Sapiens
catctcctctgtgactctgctggttttctgccttctgcccaacccagactgcttacagtctcactgcctcccctcagtgtcaggctgtttagaaaaacaacttcctattcacattccagaaactcaccacagcccttcccatgaagttagaatgttgataatgcaagagtaatgttggcagcttagaaatagtggttgccaagaggcaaggggtcacccccttccatggaagatggtctggaggcaggcgcaaggtgaattactcctggatatcccaggctgagcaatgtgggaacagtacacacacaaaggtttccttggattatgatataagctccaatttaaagtagtacatttggaaaacatgctttgaattaattacaatgtgattttccagtgcccattttccagtaattatgacatgtcagtgaatgtttactattccggcagccttctgagggaaagaagcaaaattagtagcacaaaaaaaaatagagaagaatggaaaaagccactaacagttttctggcgcttgggaaattttattggtaagtttcaaaatgacgtattaaatagacataggtcatgtgaaaggaattctgcttcttatatcagaaataaaaaggtatacaaatagatacctttttattttcctcttcccatgggatgtgtaggaccaaaaagctgttggcatagtggttaagacttcagctgtgctgttaaactgcccgagacccatcctggctcctcttctggctatctactgggcaaactacttaagctctctatgcctctgtttcctcaactgtaaaacagaataacagaacttgcctcaccgggttgttgtaggatgaaatgagttaatatgtacagagtgattgaaatgacacttggcccacaattgatgctcaacaaatgttagtgattattattacttttcagattgatctcagacagcaaaatcaagtatcaagtatttagtttcaagtcagaaagccat

SEQ ID NO: 482718 - DNA, 1000 bp, Homo Sapiens
tttttttttttttgtttgtttttttaggagtgtgttttgaccaaaaggttgaaaatccattaggacactgaatgtagacagaggcctggagaggggagcttcccatactcttcccacacacattgtatctaggagtttcctgtagcatcatacaggtgtgattaattttgaataacaagatcatacatgaaaagttctatatgaactaaaagttgaccaactgaatcatatctttaaggtataagaggagctctttgctgaaaggaatcttatcattaatacttttttttttttttaaatagggtcttgctctgtgacccaggctgatcatgatcatggctcactgcagccttgaccttccaggctcaagagatcctcccacctcagcctcctgagtatctgggactacagtcatgtgccaccatgctcagctaattttttttttaatagagacagggtctcacaatgttacccaggccagtcttaaactcctggccttaagcaatcctcctgcctcagcctcccaaagtgctaggattacaggcatgagccatcatgcccaacctcattaatcctttagtaaagcagagaccttctgtttgtcttggtaaatccagatttttactcctactggtggtgtgtgagccctttgttaactaaacagtttgtaagaattgctctatctcccaaagaatttcccagcttatcattgacggaatggaagaatttgcctcaatagatccctaaaaacaaggtgcccttggaggtactccactctgtcaagacaaggggaactgtcaaatcttgtcaagatgctgctcaaaagtaaccagggaaagttttcgtgggggctctagccatgagatcacaataggccaactaaagagatggctttcaggatacagtggatataacctagattaaaagagttacgtataaaaacagttgttcaggcaatgtgggaatgaggccttctctttctctttacctgttctttgta

SEQ ID NO: 482719 - DNA, 1000 bp, Homo Sapiens
ccttttccaaagatgagtttatcggtgtatggtccccagtgcccgagtttccttttctctgcatccttgacaacatctgctcttttttgcctttttaataatagccattctgacaggggtaagatggtatctcactgtggttttgatttgcatttctctgatgattagtgatgttgaacatttttttcacatacatcttggctgtttgtatatcttcttttgagaaatgtctattcatgtcatttgcccagttttaaagggaattatttgttttttcctattaattgagttccttatatattctggatattggtctcctgttagatgaatagtttataaatattctctcccattcaacaggttgtctgtttactctgttggttatttcttttgtgattcagtttttagtttaattaagcccccatttgtctaatttttgtttttttgttgctgtgttttggaggtctttgtcataatttttttggccctagatcaatgtttcagaagagtttttcccctaggtttttcttctagtatttttttaacagttttgggcctttaagtctttaatccattttgagttgattttttacatggtgagatagggtccagtttcattctcgatgtgctcgccatttcagcacatttattgagagactgtcctttccccattgtgtattcttgtcagctttgttgaagatcggtttggctgtaagtatgtgatttctggctctctattctgttccattgtttatgtgtctgttttcataccaatatcattttgctttggttactatagcctgtaatatatttgaagtcaggtaatgcaagtcctacagctgagttctggttggtcaagattactttggctattcaggctcttttatggttccacatgaattttaggatttaaaaaaaaattctgtgaagaaggatggtattttgatagggattacactgaatctatacattactctgggcaatatggacattttaacaa

SEQ ID NO: 482720 - DNA, 1000 bp, Homo Sapiens
ttttttttttttttttttttttttttaacaaaaaaaaaatccattacatttattaataatatatcttagattctcatcctgttcttttaaatggcgcccactggtctcatacagaggagctgtgtgactttctggaattatagaaatatccgcatccagccatgtgctgagcagaccaatgtaaaatgttcagcaggttttccaatgtctcttggatatatttaatcatctctgcagaagaactcaaaatctcagagcagctccactccagatccagggcaggaggcagcctccagggagggaggctgcgtttacgagaatctgccttttgtgtgtgcctggctgggaccagcctctgggaaagagaagcaccaagacgtgaacagggctgtgggccgatggctttagcagccacataatccctcctttgatgtccagggtcagttcgagcctggtcccccaggctasgaggagacgaatgaaagaatcttgctgtggtctttcctgcaaaggaaacagcagtaacattgattacccagtcaccgggaggaattcttgtgagcgcgcacctctgtgtgcctttgctctccactttcaagagaggactttaatcacaggacaaggagaagacccaggcccatttcagtctccgggacgggtcacagcgagccgtgtgacgctggccttgctcacacgtggccatgacaccagcaggctgtactcaggctttgcgtacacaatagctggtaggagtacccatttcagacacgcacccactctaactattctcagaaagtctcagctcacctcgccgtgggagagctgggccctgcctcccttacacatgggggcaaacggccccctgctggcactgtgtcctgccttcaggcctgggagctcttaactttctgccaacagggttttccaagtctacaaacccccacgccgcaggagcacatgcagatgactggcaccgtgctgccgccgggccggggtggac

SEQ ID NO: 482721 - DNA, 1000 bp, Homo Sapiens
gcaaattggttttagataaattggataaagcaatggaaattactaatgatgcttttttcctcactaaacaaaaacattctaagaatatatacagagaagtaagataattgctatttattttatttttgtttattttttagagacagggtctctctctgtcacccaggctggagtgcagtggcacgatcctagctcactgcagcatggaactcctgggcttcatcaatcctcccgcctcagcctccagatagctgggatcacaggtgtgcagcaccacatttggctaattttaaaattctttgtagagaaaagggtcttgctgtgatacccaggctggtcttgaactcctggcctaaagtgatcctccctcctcagcctcccaaagtgctaggattagaggcatgagctgccgtgcccagccataattgctattcaaaaatcacaacttcctaagttaattctgccttctaagggagttgcaaaatttttctctaaagtagaaaaatgattcttcatgaaaataccttagtagtcttctttgggaataaaaagtggagtctgaagcgtatgaaatggacaggcaatggcaaataaaagaatgagaacttgagagagaggttttgtgaaggccctgggaccttaagaagagggtggaagacgaggatgattttaagacaggcagcacagaaaaaaactcagcaggatgttaggagccctacagaggagaaagggtcaatgaagtattctgagaagcagaaatgacacaggggatttaaaaataggaatgtctaataattataatctatttgctatgctttgatatggtatagtgtcccttttccccattaaccctcagctgtcttgtgttggtggtggttctggggaatcaaagtctctgtggtgtttttatccatggagtatgtgtagaggtgtgtctgtgatcagtgtatgtgtatctcagtgtatttgtgtgatctctgtgtatgtatgtgtctgtggt

SEQ ID NO: 482722 - DNA, 1000 bp, Homo Sapiens
gatctttgctgttagcaaattacaagtgatacaacacaatattgttaactatagtcacagtgctgtatgtcaggtttcagactttacttccccattatttccatacatccacccagcatcccctcccctacagcatctcccaggttctggaaaccaccattcaactctccagtttctagaaatttaacttttttcgaatccacatacaagcataatttcttccaggttcatccatgttgttgcagatggcatgatttccctcttcttcctttttttttgagatagtgtctggctttgtcacccaggctggagttcagtgacacaatcacagctcactgcagccttgaacttccgggtccttctttttaaaggctgaataatattccattatatgcatggaagtgatgtatgccacccatgtattacttacttagaaggaaaatccttccctttatttctggggactggaacacagagcagtaattcagctacaatcatacaaagaaccgcactcaaggaacaggtggaggaacaagactgaaggaaattgggtccctggttcttcatttagctgagctgctcctcctgacctggcctgccaaactatcacaacagaaaaaaaaaaaattttatttaagctattgtgtttggaatttctcttattaaagcaatttatttgttgttgttcttagttcagagatgaacttttggtgtaacacctcaatattgcagtgccctagttagcaggaagaagaaaaggtctagaaagtagagagaatgttacttagaatgaacatacctaggttaccgtatcaaaaatcatcccaatatagcaaacttgaaagtaattgagggtgaagggaaggaatttctcaagagcagacaatgagggtgacactcatgtgaccaggaagagaaagaggtgttattcaatctaccatcttgcaatacggcaaccagcagtagaattggctgctgctcacctacatatgcccaaatt

SEQ ID NO: 482723 - DNA, 1000 bp, Homo Sapiens
gatcaaagaagtaattatagagaaatagaaaaacgatgattggaattcaggtgcctttgtcattcgtgtgtgttttattatatttatgtatttcttatttttattttttgagatagagtctccttgtgtcccccaggctggagtgcagtgatgcaatctccactcactgcaacctccacctactgggttgaagtcattctcctgcttcatcctccagaataggagctgggattacagggatgcaccatcgtgctcggctaatttttgtatttttagtagagatagggtttcaccacgttggccaggctggtctggaactcctgacttcatggaatccacccaccttggcctcctgcagtgctaggttacaggcgtgagccactgttcacagacttgtatattatgctataataagtctcttcatttccaccaccactcatatatctgtcactcctttgccaggtattgatttatgtgtaggatgaataaatctcagaaagaaattaattaagcgaggattaaacaagtaggaaaatcaaacccagtaagcgtttccagtcaatgattctacctcacaaacatatcttatatccatctacttcattcatttagtgtctaaatcagcaccacatttcaccagtggggtggcaattgccttttccacggtctcctagattccagttatgcaactgagcctcccttattttcatgtcagtcatattaatcatgtagggattcctggttaccccgaggtgaatccaatggctgtgagtgtcaaacacacactccttgttgctccttagtttcctgtgtacccagtgtgctctccgtctctctacagtcgtcttgtcattctccccacatcattcccagcatttgaggcagagcctcttccttccacatcagattgttttcacctttgtgccttcacggctgacagctgtgtgtgcaaaatccttccgccaatctttcaggggttcaatccgtgtttttcattaat

SEQ ID NO: 482724 - DNA, 1000 bp, Homo Sapiens
tagttctgtggctgtgaatgttataattaaggagatttgtagggagattagtatagagaggtagagtttttttcgtgatagtggttcactggataagtggcgttggcttgccatgattgtgaggggtaggagtcaggtagttagtattaggaggggataggtgtatgaacatgagggtgttttctcgtgtgaatgagggttttatgttgttaatgtggtgggtgagtgagccccattgtgttgtggtaaatatgtagagggagtatagggctgtgactagtatgttgagtcctgtaagtaggagagtgatatttgatcaggagaacgtggttactagcacagagagttctcccagtaggttaatagtggggggtaaggcgaggttagcgaggcttgctagaagtcatcaaaaagctattagtgggagtagagtttgaagtccttgagagaggattatgatgcgactgtgagtgcgttcgtagtttgagtttgctaggcagaatagtaatgaggatgtaagcccgtgggcgattatgagaatgactgcgccggtgaagcttcagggggtttggatgagaatggctgttactacgagggctatgtggctgattgaagagtatgcaatgagcgattttaggtctgtttgtcgtaggcagatggagcttgttataattatgcctcatagggatagtacaaggaaggggtaggctatgtgttttgtcagggggttgagaatgagtgtgaggcgtattataccatagccgcctagttttaagagtactgcggcaagtactattgacccagcgatgggggcttcgacatgggctttagggagtcataagtggagtccgtaaagaggtatctttactataaaagctattgtgtaagctagtcatattaagttgttggctcaggagtttgatagttcttgggcagtgagagtgagtagtagaatgtttagtgagcctagggtgttgtgagtgtaaattagtgcgatgag

SEQ ID NO: 482725 - DNA, 1000 bp, Homo Sapiens; identical to SEQ ID NO: 309204

SEQ ID NO: 482726 - DNA, 1000 bp, Homo Sapiens
atatttaaaaaatcattttacttattaaaactttctcatttcccaaggcacttcagtagctttcacaaaaacatgtttgttcttttttaaccaggtgaggcatatgctttaggagtaccatggtaacataatcagcaaagagaagacaattacactgaacacaaaatatcacccaataaagttacaggactaaagtgagctactctgaaagactatgaacacaatttaaatttcttttttgtaatatcctcccatgactaagtatcaagaaaggaacacacacaatgacactgtttttggcacttagagaagtgctagaggctagggctggtaaggccttgcaccagtggcagctgcagacaattgccagagtgattctgtgtttaaaaaaaaaaaaaaaaagacacaaaccaggaggctaaggaaccagcctttcccaagtgcattctgaagggcaaataacaaggagaaaaggatacaacaacaaacaaataaacagtaaaacaaaacccacattacagctttgagagaaaagacaacgttgctcatctctctcacctgataaatttcctttaaaccatacataagacgctatagtagcaaggaggtttccacagcagtggaaaacaagaatagtagattcaatggagcatttattatgagcctggacaagcccagtgctttgatcagatgtaaacaagtctactcagtcgtcatgctgagtggtcttaagagctcacacatcagtgcactttgctggtgatctgcatctgctcattctgctccatcttcattacctttcactttccctagctctgcgctctcctgccctggggaagcaatgatccagttaatgtcctctgtaactgagaaaaggtaagaatcaaactccttgtgcaattacttccttttcctctaaagttcaccactagaggggagtggggaaaggggtgggggacttagacctctagccttattaggggccttttcaagtagtcta

SEQ ID NO: 482727 - DNA, 1000 bp, Homo Sapiens; identical to SEQ ID NO: 120046

SEQ ID NO: 482728 - DNA, 444 bp, Homo Sapiens; identical to SEQ ID NO: 309207

SEQ ID NO: 482729 - DNA, 1000 bp, Homo Sapiens
cttgaaaacttgaatttcagaagatcgatctacaagagagaacaagaaaatgtttacatttatgaagaaaatgataactatatgactgtccctttaaagagtataagcattactacccaaagggcaagtacatttgtacatcaaatcctcattgctcagtcctatgtggtaatacttcacaacatatttagtattttttatatagtagttgtaaagtcttttttatatagcagtaaaagtcagtttaaataatggcacatagaaaacaagaccgccaacgagatataataggttactgtataaaatttctgattctatagctacacaaaattataaattgatattgaattgcacagtatatcaaaaatatgttcagaaagatatctggaagcatggtttaacacagcgttaaaatgattatcttcggtagtactttggaagtatctttttctttttaaatttttatattgtttgaagttcttatgtatattttttcaaaaataatgtattttaaagaaaaagaaattctaagtattaaaaaagacagataaaagaaaaagttaatatcaaagagttccacattcaaaattcattgctttttttatttaaacacattacattggcaagctacctttttgccccaaaaaggtgcctcttaagttagctttaaagctttcttacttatttgctactaacatttgtcatcaaaaagattacttcagaaattctacaacaagaaataaaacaagtgttgttacatttttttcaaattatcgtcctagccatattttaataacattttcatgctcaaatcagaaccatattcttgccagagattctgataaataaaaaataattaagcctctacctacactagagaagttcaaactcttctgcaaccttcatttccaaaccataaattgtttctctttcattgttttccgcagagtaaaagacctgtcatattcttcaacgctaacttaattcccatctcaccctc

SEQ ID NO: 482730 - DNA, 1000 bp, Homo Sapiens; identical to SEQ ID NO: 309209

SEQ ID NO: 482731 - DNA, 1000 bp, Homo Sapiens; identical to SEQ ID NO: 309211

SEQ ID NO: 482732 - DNA, 1000 bp, Homo Sapiens
atgtaccatgcatttctcagcttggggtactacattttgtggaaagttaatctatctatctttccacatctgaattaatcattctaggaaagaatacttattcctactcatttcctttatgatgtccaaatggttgcaggatcataatctattgtgccacctttatttctagaagtacaactaatatgttcacattttcaaataaataatactccccgtaagtaataactgcaaccaatcagtgttattcagtgctatgcctccttgtaatgggtagttattaattattttcagagctttccggaaatactgtcctaactggctatgtttaggatctttgttatctctgaagacaaagaaagaagctaggactcttaattttggggtgcttcttgactcttagttgggaaactgaaaatatttccaaccttttacccacgtcaatggcatattctgggaatcaccaccaccaccaccactaccacagaaagaggctggaggctcctgtaccctgttcattccttaagggccctgcttcccttaataagtaagtaagttggtctacggccctaaatatgcaaatgagagctgaaggtttttaaaaggtagaaaggaaaagggcaagggcttccacccctgctttaaaatgatttatttattctctgcttgtatttcttgtggagagagtaaggatagaaccaacaaggggctgagtagctgagaaaggggccacccaagagtgaaacatactttataccagaggagcagtggagcctcatgcagcacattatcatttgttatttgggtttaataataattttgacatcatcttttcactcatacacaaaaaaagtcagaactggtgttatttactgttgatttcatcctcctgtgtatgaaataacaagcctagaggaatgaactagtgctactgaactgtttaaattatttttgtgttaatagtacactttgagtatctttttccacattaaaaactttc

SEQ ID NO: 482733 - DNA, 1000 bp, Homo Sapiens; identical to SEQ ID NO: 120047

SEQ ID NO: 482734 - DNA, 1000 bp, Homo Sapiens; identical to SEQ ID NO: 309215

SEQ ID NO: 482735 - DNA, 1000 bp, Homo Sapiens; identical to SEQ ID NO: 120048

SEQ ID NO: 482736 - DNA, 1000 bp, Homo Sapiens; identical to SEQ ID NO: 120049

SEQ ID NO: 482737 - DNA, 261 bp, Homo Sapiens
tgtgtataaagaactatcttagccagcgtggtggggtatacttgtagtcctaactactgaggaggctgaggcagaagggatcgtgtgtggccatgaatttgaggctgcagtgagctatgactgcacctgtaaatagccactgcactccagcctgggcaacatagcaagaccctgtctctaagaaaattttttaaaaagtcttaaaaaataaagtagggataaagcaccacttccataatattggtagagtcaccaatatga

SEQ ID NO: 482738 - DNA, 1000 bp, Homo Sapiens
ttttttttttttttttttaaaacccagagcaacattttaatagtcatgagatcaaggattcctgggaaggagaggagatgggaggctgaggcccgggagctttcaagacattcatctgcctgtggcaaggtcagcacctgggccagcccgaggagcatctcagctggcagaccacgcagtccctggaccttgcaagcacatctctgacccaccccatgctggagcctctttcctcaggtgagtccagcagggagagttctgtgtggccactgggaggcagctttggtgaagggcatggtcacctccgcctgagtttgtcagtagctcaacgcatgaccctggtatgaacaaaaactgggtgactgtgtctggccacgtaccctaccacccactaaactgggtgaattattgtttccacagcgcaccttgatttcatacagataattccatgcgggtttcatacatatatatatatatatgtatatatatactttatatatatgtaaatgtgtatgtccatatgtacacatatacatatattcacactcacacatacacacacataagtatacacacacatttccgcagaaagaagtcctgccacaatttggcttttttgggacagtgaaattgacaatgcagtttcttcaccaatcccagaaaatcaagagtggtgctttaaaaaatgcaattccaaaatcccggctttcttccttttaaaaaaaaaaaggttaacaaaactttccttccaaagtcgagagacttaattccatttgattgcacctctgcaaacgtgtaaaaaattttgaagtagactagaaaacgatgccataatatggctgtatgtcactgttccaatgtcaccacctccacagcttggccgtccatggtgactgcgctgtctgatatcctggtggtcacaggggccatggccacctgcactggtccgttgccctgggcgaggctggtcaccacagtctggtacatgctcacagggatc

SEQ ID NO: 482739 - DNA, 1000 bp, Homo Sapiens
ctattttaatatatttccataatataatgtgccactatgccaagtataatccttgctgaacatgtttacaaagagctctggagacataacatattttgcaagaacatgtaaagcgatatttgattatgagacaataatttgttagataaaaccatagcaacctactctaactgttcaataacttcattttatgtctacccactatcacttaaagctgaaatgctcctcaccaagttgcgtaatgccccctttacattcttattccgcagggtgtagataaaagggttgagtgagggagtcaccactccatagaagagggccatgaacttgggttgatcccttgagatggaggaggggggctgaaggtacatgctgatggctgggccataaaataagaaaactacaataagatgggaggagcatgtcccaaaggcctttttccttcccttggaagatttgatcttaaatacagcacttccaatactagcataggaagcaagaattaagcatagtgggacagctaacataaaaatgcataccacagagagtgtgagctcgttagaacccttttcaccacaggcaatctttatcagaacaggaatctcacacaccaagtggtccagtttattagagcacacagtggcaattgtaatgtggcagtggcctctgagacagcatagattattccaattagccacacggtggaaactaaggatacagacgcgctgattcatgatgagggtgtagtgaagaggtctgcagatggccacatagcgatcaaaggacataatagccaaaagcaaacattctgttccccccattatgtgaaagaaataaagctgaaccgcacaccccatatagctgatggtcttcttagagcttcccaggttaaacagcatctgagggacaatgcttgtggtataacacatgtccaaaaaggagaggttggtgaggaaaaagtacatggggctatgaagacgagagtctaacctggacatga

SEQ ID NO: 482740 - DNA, 195 bp, Homo Sapiens
gttctgcttttcaaactaaactactttttttgttttagtaagaaaaatatgcagctatacctggacatccagggctacctggctcaccctttggaccaggtggaccaaagtgactggcagggtcacctttgtttcctgaaagggataaaatgcatgtgacattactttagacaatttaatttggtctcatacagg

SEQ ID NO: 482741 - DNA, 1000 bp, Homo Sapiens
tcaggcaggaccttgggaagcccacaccggggtgctggggagaagcgggctgtacctgcttgagagaccaggtgtttccggctctttcctcctcaagagatgcggtgcctcaagaataaccattcccctccccaccacttcagcggggtgacctcagctgcggctgcgcgcgtatgccggcccgaaaagagcagccagctgcgcctcagcaaggggcgcggcctccaaccttcgcatgctcacctgcccccgcgccggtgaccagtaccacccgcccgtcgaacctcagcggtgagcccatgaataaggcctgcaacgacacacacacgaacaagcagagccgctggacgccgactgcgggacaggaggaggcggggaatggcgggggcgggacgagggtcagtgacttgccgatttctggtaggaagatgagcgcagagcgcgcggctcccttggaatcctgggaaatgtagttaagagtgactccactcgctggaagacttgccttccaggggccatttctgcggctggaagcaatgggagctgctaggacttgtgtagaagaatagttaactcgacaccttgcgttcatctattcacctgtcgtttcatcattcactcaataaacgttttctgggtttagttgctgacctagagaaacagcatgcggcccctatccttgaggggcttccagagatagcccctgggaaggaaagtcccccttagggatggtaaagatttgtcagtgtaataatccctgcacttctacatgcaaacatcaggggactgtcaaaatgcagagtcctggacccccactgcttacctcccaaaatagaatctcaaggggcaaaaacattttgacaagtgttcctaaatgatcttgcgtttgtatgttgagaacagtcatagttcaatcaacatttactgagcaactcctgagttttgataggatcctcatgctactcagagtcagatggtaaactttcaataacggtgcagc

SEQ ID NO: 482742 - DNA, 276 bp, Homo Sapiens
agattaattgagggagtgtgtgggtatcattcagggtggattccatcccatctgaattaccccgcaccattcaacagcagtgggctcctctctccttgctctgcttgaaggagctggggcccatgctgcctgttaatgctaaaccatcttaaagttgatgcctacttcccacaggaggggtgcagagagggcctggaagagagggaggggatagatggcatttgcttacctgcttagccaaggctttggccaaatctttggtggtttctgtcttgc

SEQ ID NO: 482743 - DNA, 1000 bp, Homo Sapiens; identical to SEQ ID NO: 309220

SEQ ID NO: 482744 - DNA, 1000 bp, Homo Sapiens; identical to SEQ ID NO: 309221

SEQ ID NO: 482745 - DNA, 1000 bp, Homo Sapiens
ccccatctctactaaaaatccaaaaattagccgggcacggtgctggtgcctgtaatcccaggtactcgggaggctgaggcacaagaatcgcttgaacccggtaggcagaggttgcagtgagcagagatcgtgccactgcactctagccctgggccagagcaggaccccatttcaaaaaaaaaaagaaaaagaaagaaaaataacattcttttgaaattatgaagaaaaaaagtgggtgggtgggttggatgtatgaaatggtaaacagcaatgtaaaaaaactcgggagacattctgggcttaactgaacactgatcacatgccaccctgccccaccccagtctcttacctgagtcgtaggcgaagtccgtctgttcctgtttgatcaccacccccgcccctgggtacctgtgcccattgaccccaccctggtccacggctggctggcccgcctgttcatacaggggatcatggtattcttgcttaaagctctgctggggatagggtgggcagggctccgacagctggtgttggtagggggctgggaggggttcccggccccctccctgagatgtgaaggagtggcaaatgtccaggggctgctggaagacggagctggatgtggttggatggagaaggaagagaagagaactttaaattaatccttcctcgagcctgttactcctaggcttttagagtgggctccggaatggggggtagggggttggggtgtcagtatttctccctttctattccactgccccctgcctctaccaccccacagctcaagtctttatggagaacactcaggaattgaaaaaacacctgggccccatgagcagtgggtttccctgtctccttacctatgttccccgaggtacccatggccagggtggggctgggaggtgccagaggatctcaggaaattccgttgctctgcccggggaaagggctgtaggggcgactgtccaagggcaccaggggcaggggacttgatggc

SEQ ID NO: 482746 - DNA, 1000 bp, Homo Sapiens; identical to SEQ ID NO: 309222

SEQ ID NO: 482747 - DNA, 1000 bp, Homo Sapiens; identical to SEQ ID NO: 309223

SEQ ID NO: 482748 - DNA, 1000 bp, Homo Sapiens; identical to SEQ ID NO: 309224

SEQ ID NO: 482749 - DNA, 1000 bp, Homo Sapiens; identical to SEQ ID NO: 309226

SEQ ID NO: 482750 - DNA, 1000 bp, Homo Sapiens; identical to SEQ ID NO: 309227

SEQ ID NO: 482751 - DNA, 1000 bp, Homo Sapiens; identical to SEQ ID NO: 309228

SEQ ID NO: 482752 - DNA, 1000 bp, Homo Sapiens
acgcgtccgggggaaatctccttcagtggaagctgctgagtgtcgttggcggaaagtatcctggagcccagcaaaagcctccaaagcactagagcttccctaaagaaaagcagaataaaagaaagacaagaagggaagcccgttcctctaaagcccgggtttccaatagtcccggatcctcctggagttgggcgaaggcgcagttggcagcagccgctgctggcacccggacttggaaaggcggtgttcccccttttcgggaggagggaggcagggacttgcaggcaagagttgcacctggtctaggaacctgcagagaaaagaactctggggagaagaactgccccggagcgcagcagccaccctccgaccatgccccggtgaggggggcggacttcgagggcaacttgccgcggactgcctgggcttagccagcgagctacgcgctcccgggagcccggaattgcacggcgcagcccggcggggggctatcgtctatgtcttcttggggcgccagacgaatcggggtctcgtttttgctggaagagcccagtgttggtggcttcaggtggctgctgccgccgccgccgccgccgccgctgctagtgcggtttccgccgctggtgcgaagagaagagacacgcgagcggggagacctccaaggcagcgaggcatcggacatgtgtcagcacatctggggcgcacatccgtcgagcccgaggggagatttgccggaacaattcaaactgcgatattgatcttgggggtgactgtccctggccggctgtcgggtgggagtgcgagtgtgcactcgctcggaagtgtgtgcgagtgtgtatgtgtgtgtgccgtgtcgggctccccccttccccccgttttcccgtcgagtgatgcacttggaatgagaatcagaggatggaaatagtctgggaggtgctttttcttcttcaagccaatttcatcgtctgcatatcagctcaacagaattcaccaaaaatcc

SEQ ID NO: 482753 - DNA, 1000 bp, Homo Sapiens; identical to SEQ ID NO: 120050

SEQ ID NO: 482754 - DNA, 1000 bp, Homo Sapiens
agaggccgggcatgatggcttatgcctgtaatcccagcactttgggaggctgaagtgggaggatcatttgagtcccagaattcgagactaccctgagcaacatagtgagatcttgtctgtatgaaaaatacaaatattagcgaggcgtggtggcacatgcctgtaatcccagctactcaggaggctgaagtgggaggatcgcttgagcgtggaagttcgaggctgcgatgagctgtggtcgagaactgcacagcactccagcctgggcagcacagcaagaccccgtctccaaaaaaaaaaaaaaaaaaaaagggcttttgagcgcttctcgccagcctctgctgctccctggtggcctcctctggcctaccctctgccctggccgctccagctgggtccagcgtttctcaacgcgtccccacgtaacccccggacagtcctcttgctccctctctgctgtgcagggcggacctgtccctcccccggggctgtgacactgcggcggctacgcgggcacctgttgccggctggagcgtacctcctgccctcgccaggagagtgggttaggcacctagttctttctccttccaccctggtcaggcatcctcctggaaaccccgttggaaaaggggagatccggccgggtgcggtgtctcactcctgtaatccctgcactttggggggccgaggcggacgggtctcttgagatccgttcaaggccagtctggccaacatggtgaaaccccgtctctactaaaaatacaagaattagccgggcgtggtggcggccgcctgtaatcccagctacttgggaggctgaggcgggagaatcgcttgagcccgggaggtggaggttgcagtgagccgagatcgcgccacttcactccagcctgggcgacagagagagattccgtctcaaaaaataaataaataaacaaataaataaataaaaatcaaggctgggcgcggtagctcacgcctgtaatcctagcactttggg

SEQ ID NO: 482755 - DNA, 1000 bp, Homo Sapiens; identical to SEQ ID NO: 309229

SEQ ID NO: 482756 - DNA, 1000 bp, Homo Sapiens; identical to SEQ ID NO: 120051

SEQ ID NO: 482757 - DNA, 911 bp, Homo Sapiens
tgcctaagttacttatttgttggttaatcatcttttcctctccctagaatataaactccaaaggtcaggggctttttgttgttgttgttcacttcctgcttccccaggcctggatacaagtatttgctaaatgaataaataaaatgaatgaactgatttttaaaattcacattaaaatgatgtaattcagttaaatcattcaaacacttgctagatttaccatcttttctttgccttttcctctaaatttgatcccggtgatatgcaaattaatacaaccgtcaaacaactttacacatgtataaatatttctctgtcttacctgtcatattgcaagtcctctggttactttcaaaatgatattgtcgtcgtgcttgggcaatgtattctgcagcctccctttcctgtatttctctgattttcttctgtccatatttccccagaatatatactcctacaatcattaaaaaagtactatattcattagagtaccaaaaattctacacagtatttttaacctactttatgcaattataagttttatattagtggatagctaaaattacatttttaaaacctaaataaagaattttgtaagattggcccaaagaaaaggaaattagcatttttacagccaatgacagaggaaatgatgggcacataaggaccaggtttgaggaagggaaaggaattaaatctaaaaagtctggcagtgcctttactagtagactagagatattctacatgtccagcaatggagaattgtttaaataaaatgatagtctagccatacaacgaaatcttatgtagttattaaaaaccacattgctaaataatgactcaaggaaatatccatgttatactgttaggtgataaaataagatcccaagaaatgttactttttttaatgg

SEQ ID NO: 482758 - DNA, 802 bp, Homo Sapiens
gactaaaatgtagtcccacagtgttggactacaacacggagaaaggtactccaaacttacacatttgctatggtccgttattactctcatgggacactctaccatactctacatgtagttccaagttctgtgattttttgaaaaaacctctcagcagagaatgtaactttatgttagacaaacatgaccaccaccacaaatataatttgcttttaataacactcccaagctttcttcttacctgaacaaaatgactaggtgtttcactgcaaactgaatggatctgtccgtttactattggaattatcttagctaaaggcaggctgacactggaaagactgaaaaatcattacagtaatgattattttctgaaatgaccccacaggactttaacatcttaattataaaagtaatacatagccattgtagaatatttttggaaatctattaaaaaggaaaaaaaaccccacaattctatcgcttagaaataacaactctaattgacatcatgaccaatttcttttggcgtttttttacacatatctttgtttttttgtgtctaccaaaaacctctaacctcctaagcacactgtttttgcatttttattgttatgagtattttccatcttattaaaagttctaaagtgtttgtctgattgttttttaatgactatacagtaatctgtcctctagctgtgacaatttatatcatgagttccctagagttgggcatttcagtttttgcctaaattttcttaatctaagtaagattttgtataaacatgaaatcactgggtcaaaa

SEQ ID NO: 482759 - DNA, 1000 bp, Homo Sapiens
ccaaggccagtgcggagcggagtcggttctggagctgaacccatggcgggctgtgggtgggtgggaatcccagcactaagccaatcccagcgcaagggcgtggcaagggcaaagccggggccaatcaaaggcccgccagccttaggccatctgcggccaccagcgcaggccgacctcccaccgagggggcgtggcccgacactgctgcttaggggccccgggtgtggagaagacaaggggccccattccccccaaaaagacaaagactgcatgtggggcggaagatcggaggtctttatttccggttaccacccctccccctcgattcaaacacagtgatataaaaggaatagaaacaaaaaaaatcaggccatgagaataccaattaaccctctcccaccccatccccccaatcactcccaaatcaggacacacgattgatgtttgatgtttatccccgactcctcctgttaccctctctgtccaggactctggtcttccctgaagcctccaccaactggtgggagaaaggaaactggaccttggagaacttcctgtgtagcaacttggttctccgagaacaggtggggtaggggacaccaggtaggctgccatcaccccctgtcccttccagccttcttcatggccccatttagccttccaaatgcaacatggtcagacagtgcccaacactatggtccctctggcctctcattctcaccgctccagcctctgtaagactgccagcccttgaaggccctaatgccaaagtaaccattgctcccaggctacagttccttcctttggcagatgtccctggccagggcccccaacctctacgcacccctgacctggagttaggggtagaggtttggggcagggtagtttatccacccctcactcaaggtgggcaatcagcaccatcatgataactccccccagcagccccagcacctccagaagtgattgcaatggtgatgcctccctcagcagctcgggc

SEQ ID NO: 482760 - DNA, 1000 bp, Homo Sapiens; identical to SEQ ID NO: 309232

SEQ ID NO: 482761 - DNA, 1000 bp, Homo Sapiens; identical to SEQ ID NO: 309233

SEQ ID NO: 482762 - DNA, 1000 bp, Homo Sapiens
gatcttgggcatgtagagggactgtcatattcatgggcatgtcaggggaggaagctaggggctgggcagattgagtgttcactttgaaatgattaatttggggtgactgggagacacccatagcagaatgtcctcctccattgaggaccccagaaggcaatatctgtgtgccttttcctttctgaaagaccttgcattcccagggggcaattctaaatagaccaggaaacctcccacaattagacctaacccagacattgaacctccctctgctcagcccattcataaagtgcctctggcatttaggtgtcttctaatctcattttctctgcttgttaatggacccactgaggcagtactcctgggagagagagaaagatttcatttgtctggggctgaggagggagacgagggttgccagagctaatgaggaatcagtgccttgtaattgctaattaaatgagcctggctctctctcttggggctgtgagttggctggccggcccttaagtgtccacaaattcaattatgcttccccaataaacacctccagcaaccattgccctccagtatctctctgggggagacctagaagaaggatcttcctgtgtgtgctgaggccattcattcatttattgattgatgtattggtttattctttgatgcctttattgattcaacacatgcttattatatgcctgctgtgtgccgggccccggaccaggcgctggggacacagcagtgaaaatactaacattgtttctgccctcacggagctcacagtgtaacagggagacaaatagacctgtcagtagataacatgaaaataattggactatgtgctgcagacacaatatcccaggtctatgagaatgtcaatacagacttcacgtgggaaatggtgaggcaataaggatcgtttcccttgatgaaatggagcttgcagaagaaggcagggtcagttgtggggagctctggttggaggtggagggagtgcatt

SEQ ID NO: 482763 - DNA, 1000 bp, Homo Sapiens
gagacggagtctcgttctgttgcccaggctggagtacagtggcgggatctcggctcactgcaagctccgcctcccaggctcatgccattcccctgcctcagcctcccgagtagctgggactacaggcgcccgccacaacgcccggctaattttttgtattcttttagtagagacggggtttcactgtgttagccaggatggtctcgatctcctgacctcgtgatctgcccgcctcggcctcccaaagtgccgggaccacaggcatgagccaccgcgcccagccaaaaagaagaaatattaagttgtccataatctgttatatctaactattataaagtataaataaaacaaaataagttttacattacttgtttctgtcacattgttcaaaattcttttgggcttaaagccaactatgaattttagttgagtaggaggacaatgggaaacagattctttttttgttgttattgaaatgtaagcaacttgcccttaaaatagtatgaatatccagttcaggtaacaactttcacttttaattagtcaaatatatattaaatataaaaatctaatgctgtacagatgtgactttggacattttaagtattagtttattcagaaacgcctttaaaaatcagtgtgtatagaactagctcatttcttaactgtcaaatttagaagtgcaacagtgggtcttcagagagaatatgcccaagaaaaactggataaaaagactgggtaaatacatcaaatgaaacagtgattcacttttgacaagactgaaatataagtatataatcactgatgcatatttattcagtaggcccatgtgattatgtggtttttaactaacagcatttatttttgcaaactgcttggcattcctccaagggaaaggagcttctagactacaaacactgagcacatacattttaaattaacacatgaattgcatatggattgttgatatgcttttagagtcttgtctctacagaagaaa

SEQ ID NO: 482764 - DNA, 1000 bp, Homo Sapiens
gtttcccaattcaactgtattaggtttggcagcaaacacaaggtcaaacagaaagcacatatgtttgctagaaggcaaatttcaacagcaagcagaccaatttacctgaccttaataaggtctttacaacacaaaacacctagagagtataaaaacagcccattttaaaagtctggtagactttcatttgcctgattcctattagaagagtgagattagaacaaatatcttcctctttacagcttcgtaaattgagattgtatgaaaatcaggccaagaagcccaaatgttgaactaaaacacaggagaagcaggtaataaaacattaaaaaagaaatatttgcctaaatttatttccccagatattaattccttattggctaaatgtataaaatacaaagtttgaggattctaagcctcaataatatatctaatttatttctaaatctcaaatcacagtccaaagcattgtgcttccctcgtatcatcttggatgctgatattacaaacagttggaacccagaagacttaaggaagcagtctactctggtcagttttccttctactcaagtttctaaaggaggacacttaacagagatgaaagggcatcttctatcttgaaggctattaacccacactttctttctctccctaaacactaaagcctgcaaaatagctctagttagacttttctttcctttacctaactttcttatttttcataataaaaatgtaatatgttaagaactcttgctctaaaaaaaaaaaatcagggggacctaaaaaaaagtaattggatttgatagtacaactaggaccataaaataaaagcagagagattgaatcagacgagacatacaaaattttaaaaaaaaatctgaactccagggagggtactaggaatgaggcaaagtaaaggtgttcattctcaatacacgaaataaacacacaagccaaatatacatgaatactggctccctggcaacagacttcttatata

SEQ ID NO: 482765 - DNA, 1000 bp, Homo Sapiens
tttttttttttttttttaacatgtttctttggaaaaatggcaatattgagtggaagagaagctgtccttttagacacccagcttattggcctgggtgagaacaactttgagaactggcatgaaagcagaggtctcactgaagttgctggtgctaactatgtgggtatgcatggtcaatccttctgagtagtttcgagtttcaatgctccttgcaatgttgtgtaaaccactggtgattgttggtgaaagtgtctgttccctaagtttatcatacagaaactccaaacgtttgctggcatcatctagcttcctcttggtttgagggtctgttgctgaagaaaggcagcgctgaataagatcctcaaatgtggtctttagaatgaggtgctcatctggaataggtttcttggtaattttttttgttggcaaagactgcacatgctggaaggtatttccaataggagcccctggggcaccttcaatattgggctttgaaaaagatggtggcatgcctgtttgaccaagaggttgctgtacgccatggaagggctggccacctggaagatgtggctgtgggaatgaagactggcttgacagtggtactggagctgaaggctgttgctgcagcatttgtgactgggggtcacccaacgggttcatgattggtgatgtgatgggaacaggaggcatgaagttttcaggcatcttcttctttttgggtactctgttcaaagctggagggtcattccaaccattctgaggacctgttctttgggacgcaggcagctcactggcagcaggcagtgtacctgttgttccaggaggcagtgcataagctgaagatgatggtggagctcctggtccgccatgctggaaggatgctccagaggaagggggaggagggaaagaagtagcagggctggaggtaggtgaagaggcctggtgctgtgctgcgtacagctgagactgcccagtataggaagaagcagaagatatgtaa

SEQ ID NO: 482766 - DNA, 1000 bp, Homo Sapiens
atctagcctaattcttcaccctttagcacctcccccacccccagtcaccccagcctcctttttcaattattggataccctgggctgcttcttgtctaaggactttgtcccacactgcctagaatatgcctcacgcctcgccaccccactcctataggcccacttatagctccacacctcatctccagtggtacttcttccaggaagcctttcctcaaacttccaggataggtcagaggccccttaaaaactcagaacattctcaatttgtcctctgtttcaattatcacaatgtgccattaaaattttttatttctgtgattatttgattagtgttcatctttctcagtccctgagctcaatgaagtcaaggacggtgtctgctttacttattttacctcagcacaaaggagagcacctaacacatggtaggcgttgaatacctactgaatgaatgaaactcaatcacttctgcttccagcacaacttaagagaaatgtggaagagtgttagaatagttgagtccttcctaccagaggacgttagtctactgtcgcactggtagcaccactgacattagttggggatgaaatagatgtgaggtgaaagacagggggcacccaacaatgttattgtttctagagtaagaaccaggagaaagactaacttcactttagaagaacaggctctaacatttctcagaaccatttgcatatgtctgttgaaatgaagaacaatacagccccagcacaaatgggtattgagccacaggagtctaactgtaatgagttcaaaacacagcctcagtcaggccagactctttcatcaaatgaatggaacttgtatttgcaactgagctctcatcctattacaaatagatcctgatggctgtattccagtcttatcttagtttcctaagatacaatacaacccctttttgattctgttcaccttagttccttaaatgataaacacctttccccatgtcttcttattcttac

SEQ ID NO: 482767 - DNA, 1000 bp, Homo Sapiens; identical to SEQ ID NO: 309237

SEQ ID NO: 482768 - DNA, 1000 bp, Homo Sapiens; identical to SEQ ID NO: 120053

SEQ ID NO: 482769 - DNA, 1000 bp, Homo Sapiens; identical to SEQ ID NO: 309239

SEQ ID NO: 482770 - DNA, 1000 bp, Homo Sapiens
cttaaggcctttttttttttttccagaaaacagcgattttaatttgaaagcgattttatgtatgagaggggaaaggagccccaaagagaagggacgcagggcaaaaatcatgccagccccagcaccccacctctgcgggctggccacctcccctcaattctcaggccaggatcctgtgtccccagcctatgctatgtgcccagggctggaggagagctgtaaagggaaggcctccgggactacactcgtgaaaccatcccctgtgggggccctgtcctcacagcccaggccccttccccaagttagacaggaagagatagggggggcggcgggaagctgggaaggctagtgcttggagagccctagggacaggccatttcagggccctgcctttcccaaacacccacctccaccactggcatttcttagtcaacctgggaaagtacagtacttctttgagtctaactgcaagtctctatcctcacaggaaattaaaaatagcagatcggttcctacatctccaccagccccttcaccaccaccaccaccttttttatatttcagtctgactgcagaaggaggtgaagtgtaaaaagagactctggacagtgacagggcccctccctcttccagagaggcccccatctgccaggtttgagaggaggaaggcctgtcagggccctactctcatgtccatcagcttgggaggcctgccccccagtatccacctctgggggagttccccatttccactcttcagatgggaagcaaaatgaggcaagatgagaaggaagcaaggtcctggaggcaaggccagtgctttgtgctgggggaaggacagagggtgagaaatcaccccaaatcatgggagaacccgacaaattcagagactcaagggcaccgaagagagacaaccagtcctcacaggtatctggggtcccttccaacttgggatatcaagcagatcccttggagggtttatgttcttggttctgccctg

SEQ ID NO: 482771 - DNA, 1000 bp, Homo Sapiens
gttttcaggagggtgctgtgaccctcttgagtccagataacttccttttaaagatgctcagaacatgtgatcttaggaatgaccaattgggaatgagatccaatcatttccttcattaccggcctctgcatttttttctctgagtcatgtttttaatagaaatttctcaactttggttctccctggcaaatagtcactggacttagagtacaaattatttttaaaccactaacaggatattttaaacattcctgttttgacagcttaatgctcagtgcactgaatttccccctattattcctatacatatttatcccagtgtagagaggggaaattattttgagataaacttcgaccttattttgtgtgtgtgtggggtgttatttaaattgcagttatgtggttcttttgaattgaggaacataagaactgcctcggagattcttacataattgcaaaggctcttcgggacactcctgtctcaggaattacctggcgattaaaacaaaataaataatgggatttaaaagtactccagatttctgatttcaaatgttttatatgaataaaaaagtacattcaattcatccaccagtaatctggactgtagatttaatcgaaatgataatttaacctcactctttccatctcctaaatgagagcatagcattgatttccacagatcctttgaaaaataggccttattctaaaatactttcctcatattgagaaactgcattcaatttctgaactgtattataagttctgaatttattcagatcagaaatggtgtgtggtcacaagctaccaaaaccaatatccttcttttatacagtgaccaatctgtgaaactagttttctaaagtaatcgtggttttcaattccctttgcctcatgcaagaatgacagaagttgttcacatgtgctgcaaattcccacgaacatacccagatttaggggaaaaaaagaaactaaaatatttcagagtgatgcatcgcta

SEQ ID NO: 482772 - DNA, 1000 bp, Homo Sapiens
ttgaggcagtctcactctgttgcccaggctggagtgcagtggcacaatcttggctcactgcaacctctgcctcccaggttcaagtgatctcctgcctcagcctcccatgtagctgggacaacaggcgcctgccaccacacccagctaattctgtatttttagtagagatggggttttgccatgttgaccaggctgatccttaaatgttttaaacatccattatttgaccttgtctctacttcgctttttaaaaaatgaaaaaacaaacaaacaaacaaacaaaaaaacccccaaaacattacttatgccacatgctacagcatgccattctaatttttctttgaaatcaattatgtaaattgttttccaggacctttaagacgtttatgcaaacagaagagaaaagcaatccatctcattgtttgctgtacttcttaaatttataaagaaaaagcataagcgatagaaagtgattaacactcaagcacaaaatttcctggccacataggaggaagaacaccagtttcagaagctaaggttcctgcgcactgctgctggaagaccacagctagaacccgggctagaattccaagtcaggagatggcctggctacagaacaccaataagtaaggaaagatgaagcctcaaaatgaaatgaaacagaaaataaaaccttaagacagaacaaaagccctgatttatcagaactgtatgagaatttgtacatcattaaacatctaaaatttaaaatagaactgagatttttatgaaactggagccattaaggaaagaagaaaagcaagataagcagggtgagtctagtagtttagtggcagtaggtccccagatcatattctaaaccagatatatttctgaactggagttttagcttgaagtgaaatgaacctcaaaacagcagctcattcatagccattgacttcttgtgcatcccttgtttccctggctaaggctttccaagactgaaggcaacactgtcttg

SEQ ID NO: 482773 - DNA, 1000 bp, Homo Sapiens
tttgatcttcaaaatcgtcctttgaggtaaatactgctatgtatctattttaaaaaagaaaagaaaaacaaggctcatctaggtttagagttaagttacctgcgatttttcagaggtggagtccaccaaggacacagcaaagggcactgtgttgttaccagaaaccaaggcaagcataacaccagtgcccatggatggatgaatattcaaggtcacatttatatgccaaccctcagcactggatacattatctatttaaaataatgaaacagaagcatgatcaatgcactcctaaagtgcaccaggaggaattattattaatacagtccaggtaatattcaaaactatcttgtgtaatactattttttttccctttctcaatgatctatataacctaggcaaaacaaaacaaacttttttttaatgcaggcaagaaacatgcaaatggagtaccatcttcccgttcttcctagaagagaattctggattgtagtgttaaggattatcatggattttcccggtttgctctttaacaacagtgcttccttctctcttccatgttcgccaatgctcaaatctcaaagtggtcatatttccaagtacacgtttgaaagttcaacaaatttactgtaataatttagggaaaatctgggtacagttgccatcatcactccaaaggatgatttatgtatgatttatatacacaggagagttggatagttcgatactagagaaatacactgacatcagcagttagttttgaaatcagaatgggaacccttgttttgtgaatctcttgtcataatccttcacattctccttcttaattactaggttaattgtctatcccaataacgtgcaagctctaggaggtatatgtctccatcattgctttgtttttcccagcagtcgctcaatagatatttgttgaattaatatgtttccagagtagttggattactaaaaataatagttcataatctgaatgaagtcttcctca

SEQ ID NO: 482774 - DNA, 1000 bp, Homo Sapiens
ctgagctgcctgtcccagcacacagccaccatcaccagcaggttccccaagatggccatcaggataaccgtcgagagaaacgtgagcagcaccaccttctccactgacccgaaaccctcctcagaactcacattagcatcaagtttgtccattacaggaaataagcatgagtgagttggatttcaatgcccacagggtccttttggatatacaacatccacgctgctggtctcaggaggacctggtctaattcaccctggatgatcatggaagagaggtctctccaggcacgacagctggactgcaggcacacaagtttagctctggtttcttccattctccgtcttggaatgaacccaggaaagtgaagtagggaaaacggagaagcatgtgagaggcgtacgaggtggcacatactcagggctagtgcccttctgcacactccggtgataacaaagcctggctttgtgtgaactttatagctttgagtatctttctgatccaaaaggcagcccggggcataaagtaccttcaatcataaagcttcacatttggccactttcctctccctcttgaatggttggttgctatcatcacttgggtctctctatggacctcacttattgcactgtattaaaacgatgcattcatgtggccacctctccttcatggtaagcaccgtatctccttcacctccttctccataacacagcacagcctctgaaatgaagccagtcttcagcaagtgctttgatgaacagtaaattttgaagcagctcttgaagactcccttgaggtccattttcttttgctgaagcccaaagaggtggggaatatagggaaagtccttctctaggttcccatgggaaagttctggagactgggaatccaagattaggcagccacatctggttggcttccggtgggagtcttttgcctttaccagatatatggttctcaaatattttcttccattctgtaagttgccttctcattttgt

SEQ ID NO: 482775 - DNA, 1000 bp, Homo Sapiens; identical to SEQ ID NO: 309240

SEQ ID NO: 482776 - DNA, 1000 bp, Homo Sapiens
gcatcggagaaggagtacagcagcaacaccatggccgccagaagcaacccaggaaagcgccaggaaggaaagggacactcgcggcggccgggaggctccatgcgcggcgcggaagacgctgttatttctccggaggaaagcagagaaaccgagagccagccgagcagggaagtcccttctgggtccagatatgggacgcaacaatccccaactcacaaagcatccagtgctgcaggacaggtgggcgtggccgagccgcgcggggcggaagtgcgtcgagtcaccagggcggctggggccaatcggcgggccgcgggcgagctcggcgttcatgggcagcccttggccttcgagaggtcagggggaggccctggcggaacctaacagaacaggttccccgaggccgccttttttcttgctaagcccttggcctaccatcccggaagcctgaggcgtcctgtgggaaaggactggctcgccgtcatatttgtgacccaggcagggtggagagaaaactaagctgctttggtaatagtttccgggaattcgggagtcaagaataaagcacttcgacctaaaaatagagatccagagtctagacagggggtcaccgtgggctagcacccctcagggttagttttatcctggggcactgcaggctgtcaggactgcctgggcccttacttggtatttggcattattcccaacaatatttgagtttttcttgcttgaatgtctgctactggatcgtctcggggccgtctttgttttctcaatctcaaaggtttgccttctgcactcccacccctaaggtaatttgccctttgctcccctccctggaggggacccttccgaatctaatttattaagcaacaccaggcaattagaatattgagactctatggggcccttgcccttgagcaactcccttttttattgaagacgaaatatacatgcatgaacaatgtaaggacaagggtgtcctaagtgccaaattcct

SEQ ID NO: 482777 - DNA, 1000 bp, Homo Sapiens; identical to SEQ ID NO: 309241

SEQ ID NO: 482778 - DNA, 1000 bp, Homo Sapiens; identical to SEQ ID NO: 309242

SEQ ID NO: 482779 - DNA, 1000 bp, Homo Sapiens
atgagtcctatgagatagcaagtgtgaagctcccataatggaggactaaggcccagagaggtgaagccattagcctgaggtcacacaaatgtgaaagggtgaaactggcagtctaatctatgtggcttgtgaccgccccgaccaaatactttgtgtattcaacaagtagttattggccaggcgcaatggctcacacctgtaatcccagcactttgggaggcggaggcaggtggatcacctgaggtcaggagttcaagaccagcctggccaataaggtgaaacctcaactctactaaaaatacaaaaaattagccaggcatggaggcggtcacctgtagtcccagctactcgggaggctgaggcaggagaatggtgtgaacccaggaggcggagcttgcagtgagcctagatcacgccactgcactccagcctgggcgacagagcaagactctgtctcaaaaagaaaaaaaaaaaaaagttaaacagttgaatccagccacctctgcgctgtctcatgctagctgctgtccacaggagaccagactcccagctaacccagctttcttgaagagggctccaaaaatcacaggctccagcagagaaaacatgagtttattaccagatggtggagatggtgggcctcaagtttggaagctgggggatttaagggctggattagtgcccctacaaatgttgggtccctcaagatcatggttaggctcacggccaagaaagaaaaataagttcacagaggtggggtctctagacaggagtaaggcacacggtgtgggtgaggctgacatccccctcttggtttcatcctggagcagggagcaggaggctccctctgcagccactgcctggtccagtcctcccaggcagggctgccattgtgcctcagcacacgctgaacactgaaggggcctggccttggtacttctcatggactgtcttcagaatgggtatgaggttctcgaaggttgggcgaaaggacgcctct

SEQ ID NO: 482780 - DNA, 1000 bp, Homo Sapiens; identical to SEQ ID NO: 309243

SEQ ID NO: 482781 - DNA, 1000 bp, Homo Sapiens; identical to SEQ ID NO: 309244

SEQ ID NO: 482782 - DNA, 1000 bp, Homo Sapiens; identical to SEQ ID NO: 309245

SEQ ID NO: 482783 - DNA, 1000 bp, Homo Sapiens; identical to SEQ ID NO: 309247

SEQ ID NO: 482784 - DNA, 1000 bp, Homo Sapiens; identical to SEQ ID NO: 120054

SEQ ID NO: 482785 - DNA, 1000 bp, Homo Sapiens; identical to SEQ ID NO: 309251

SEQ ID NO: 482786 - DNA, 1000 bp, Homo Sapiens
tttatatttaacaatatatatttatatatattttctaaatcagtacattcagtttttaacttgtttttttcttcacaaacagaagaactcttacaatagtagactttctaaaataaatactattaaaatagagcttcaaaataaatattctatacaaagaaaacctgtggcaactttgtggtggggtggaaatgggctacagtgagggggaaatgaagttgggatgtggcggggtgggagcctcgagcttttctgtttgtaacatgaaaccaagctgtgggacagtaagaagagaaagcaaggcaagacactgcacgcagttacccacagcagaaaatggcaacgcaagattcatcatcgactgtcacagtaagcagagggggcacaaaaatgcttgtcaaaggcatgaaccagaaggctagtgaggctcgcaggatgccctagtgaatcgtacagtgtagagctgtgctgcccacgcccgccagacacttcctgggacagcacagaaggagaacaggatgcttcaaggtgacagtcatccgggttctggtgcagatcaactttccacgtgtgccatcttggacaagtcattatctagctgggcctcactcgaggtatgatggcgactgacaggctccacaaggctgaaaagaactagccatgtcttccatctcagctctgagggggtgcgtaccaaaggaccaaaggaagggattggtcttcacccccttcctgctcaggaaagccttagttgtgcccaatcttttctctgggagggctttgctacccaagacccagttcccagggtgctcgcggaagcgctgtccttcattaacacgggcagccagagccccctagaagcgtcctggatcccaggtgcccctcgagttaagacagaacccccacctaccccaggtttaccaggggcgggaactaaccagcacttttcaaaaaaggtcaagccgaggcatcgtccagccaaacaggccattggtgacag

SEQ ID NO: 482787 - DNA, 1000 bp, Homo Sapiens
ggccttacctgtgccatggcgactactcaggtcaggggaaggtgaagcaggactgcaaaagagaagaaacctcgggcttagcgcgccatttgcaactcgtgccctccccaagcgcaggtccgcggggaccggcgcgctcagacagcccggacgccgccacgggccgacccgccctctcgcagctaccgggacagctctcggccgagcgtccgcgcgaatccagtgccccgcgaccacgctctcctctccagaaggagccccctccccgggctgcgaccactcacccagactgtgggacccaagtgccccgaacccccgggagagcggcggagagccgggcgacggtacgcggggcgacgccgagatgcagacgctgaaggatccgcagctgcacctagactgatccaagcaacggaaacgccagcgccccaccccggccctgcccggcttggcccgtcccacccccgccagccccaaccgcagccggccgcgccagccgggcccgcccctgccccggcctcagcgcgcctgcgtgggtcgcggctcgtcccagttggtctcccggcgcggactgtcccgctggtctcgcgggcctgggtggggagcggcgcagagctgctggaaccaggaggaggcgccgctcccccgagggccccggagacctcttgtcctcgcgccgcgggaagggcctggggagctgtccagggctcggggttttggaggtgcttgagcctccctgccctctgtgaccgcaggaaccgtagcctcacttgggtgctcaacatagtgcgtgggcgtctttttggaggcgagacaaaatcatcgcagctaaggacagcgcgcctttgtcgatgggatagaaaaaacgtgaaaggagggccgtttcccaagttgtttttgtttctgttttgttttgttgttttattgttgttttaatgcctattattgcttcctagatggccctctcttaaatgtacagccttctagtagcgtatgtggg

SEQ ID NO: 482788 - DNA, 1000 bp, Homo Sapiens; identical to SEQ ID NO: 309252

SEQ ID NO: 482789 - DNA, 1000 bp, Homo Sapiens; identical to SEQ ID NO: 309253

SEQ ID NO: 482790 - DNA, 1000 bp, Homo Sapiens; identical to SEQ ID NO: 309254

SEQ ID NO: 482791 - DNA, 1000 bp, Homo Sapiens; identical to SEQ ID NO: 309255

SEQ ID NO: 482792 - DNA, 1000 bp, Homo Sapiens
gatcatgccactgcactccaggctgggtgacagagtgagattccatctcaaaaaaaaaaaaaaaaaaaaaaaaaattaatctgtgtgtgtgtgtgtcgtggcttgaagagaaatcgttcatgaattgtgtgtatgctttagcttcctctactaagttactaaagttattccctagaagttttcagctgcttttccagctttgtttgcttttgtctctcacacaacttgtcagaagctgtaagaataaagaatataaacattgtgtaccttttcacacacatgcagcatcaatctcagtgattgcctctttcccattagaagggattaatgttctccaggtagatagccttctcatttccagtattcacttggttttgtagtcagtgattaattttttacagagtactaaggaaaagaacttctggcagcttccatagcctggtggtacttttttttaatttaacttttaataggtaatacattcacacggaacagaattcaacatggtattctgtaaagagtcccccacccttccactttgttccccagccactcagttgcccttgacagaggcaaccagtgttacaggttcctgtgtacccttccagatagataatccagagattgtctcagaacataacctaaaatgtattgtaagggagcatgaaaagatacttagattggaaatatagtattagtaatgcctgactggcatttagctcttgcgggaaaatcttgtaagactttttgagacaaggtctcgctctgttgcccaggctggagtgctgcagtggcatgatcacagctcactgcaaccttgacctcccaagctcaatcaattctcccacctcagcctcccaagtagctgggactacaggcatatgccaccatgcctggctaatttttaaatttgtttttagagacagggtctcactgtgttgcccaagctggtcttggactcctgggctcaaaagatctgccccacctaagcctcccaaag

SEQ ID NO: 482793 - DNA, 1000 bp, Homo Sapiens
ggatcatagccaagagtctgggggcaggttctagcagaaggagagccgcagagctcccagcctgctcacgggcccagcactgtggaatcacagcccagatagtgttctataggagggtcactgctcaagggctgtgctgtgctcagagcgccatcctcccgtcactcaccaccactgcagggtccccagggcgaccaggctccccctgtggagagaggataggagcagggacaggtcagggagtcacctaggagcccaaaatcccagtgtcccatctgccacatccctagtaccagacagtgccacccccagccgaggacccaccttctctccttggcggccagtgggtcctggtggcccctgaatgtagagaaagtgtgagcccaggaggggaagggaaaggggagggacacacaaaagtcccactcctggtcccaccacagtcacagactcacttcaggacccttggctccaggacgtccagcaacccctggcagcccctggaggagaggaagggaagagctgtgcaggtgggtggggacgggggatatggacagacagggctagaggctggggtgggggctggagaggggtcagggaagattgggatttaggttggcaggggtaagacttggcaggagaacagagaccaggtcagtgaaaatcaaggtcagttcagcagggtcagaggttcaaagccaggtccctggggctgagggttagagcctgtatcagcagggataagtggtcattgaggaggggtgaggagcaggggtagcaggggtcaagggcaagaagtcagaaccagaaagggcacagccaggtcagctggtatgagcattgcagccagtgggtttacccgggatcccgctgggcctgggggtccacgttcgccctgatggaaaagaagaggtcagagctgagttgggcccagatcctccagggcccttggcaccccccaggttgcacttaccttctctccagcctcacccaggggccc

SEQ ID NO: 482794 - DNA, 1000 bp, Homo Sapiens
gatcctacctctcccacaggcggggatggggtctgagtcctctcttacccccaggcttgcccaccacagcggggcacatgtgaggcctcaggaaatgtaggctaagtgaatgaacgtctacaggcccaaccgtgtccatcaagactggaaccaacccaggccctcggcccggcatcggcccagcatccgaggcctccgagtcctgcaccccgtccatctctcctgctccatgcccgcacctataggtcctctcaactgacaaagcccagacatccaggtctctgcatgtgctggaacacacccattccggcccggatggaatccagctaaactacgacacccatcctggtgtgccctcctataggaagccttccctacatgccacctaattttacggcctgcccttagtcacatcatagatcacccgatactgcagctgtcaagcttctctccgcaccctgtgcagccctccaagagagacaccaaggcgtctgaccctaggtcacacaaggcctaggaaccatctgctgagtactcagtgcactggtggcctggcagggccatgcagcggggctctccgcttcctgcctgagttctcgcactgatttccttccagtcccactcggcccggccagtgagcacactgagcccctgagccttcttcctgctctcagggcactcgggcgctgctcccaacccaccacacacttcccagccctcctcttcctagccatcaaaacagcttttgtttttgagacggagtctcgctctgtctcccaggctggagggcagaggcacatctccgctcactgcaagctccgcctcccggattcacgccattctcctgcctcagcctccctcgtagctgggaccacaggtgcccgccaccacgcccggctaatttttttaatttttaagtagagacggggtttcacggtgttatccgggatggtctcgaactcctgaccttatgatccacccgcctcggcctcccaaagtg

SEQ ID NO: 482795 - DNA, 1000 bp, Homo Sapiens; identical to SEQ ID NO: 309256

SEQ ID NO: 482796 - DNA, 1000 bp, Homo Sapiens
gtcctgctgctgaatggaccaatcacaatttccttcccagtgtggaaaaatatgaaatggatcattaaaatgttaccttaacatttcggtaccagaagctgccatttctatgctagaaagaggtcaaagagaggctccaattcagcacaaaagtggacagtgagcaataaagtttaattaaccagtactgtgaggtcaccttcacggactagcatcccttccgtgagctgaaggactgaataagcagaagcacaggccaaacccatccctccatgctccccactgtgcagatgggctcactgaggctccggtgtacattgcttgctcagcactggatctatttcgggccaaagtgtcagcagaactgatacccacagggcatccaagtccacatccagactgggctccctctaatgccatctcttaaaccgaaccactgcctgccgatggtgagtttccaatcacgagctgcactgggggtgctggaggcctggctgggcacacatcctggtgggtatgaaggggatttgggagtggcatctagaagatcagcatgaggggcacagaggagaaagaacccacagcttgcagccagcaggggaaactggctcagcacacagacagggccccagtgaagcccatccaggccagctgccctaagtacagacctgagtgggacaggacaggactgataactaaggaaaacgagagaaactgagtgtgcaggggccctactgccttctgcctgcaaggaggctatgctgggtgtgcaaacagaagagcaggtacatgaagatcctcactgagggggcatgaggagacaccaggccagaagaggcagggccagcagggcctgcgagaagaccaaaggagacagtcagtgaactatgggggagcccggcaccccatccaagctgctggggtcaaaggcaagtccagtgccagcccctccaatggaccaggccctgcctggcctgctccaagctgctgcccatctgag

SEQ ID NO: 482797 - DNA, 1000 bp, Homo Sapiens
tttttttttttttttttaatatataaattaactgctttattgaatatcaataaactgtacatataactatacaaaacgtttccttgatacaaaatgtttgaaatataaataccagtgtgcctttaaaaatgtaaacattttcctcccaggcccacctgtcgggcccccagaatagttctgggagacacatcggtcagaccagagcaccccacttgggcccccgacaagtgacagccattactcacagtcccttttcagacattgttaaattgcccgggaaacaggtgccaccccaccaaacaggaggctgaaatagctgcctgggctcggggcatctaaactctagtctgccaccgcctccgcaggccctggggctgcacctggggtggattattgcatagttagtcacacctcgtggagggtggcctgagggttccttgtgggggggggtgtgtgaggggagtggggtcccctgagtggggtgggagcttcccagtgagtctgtcagcctttgtcctgtagctcaaagcagctgtatccaaacagctctggatacaaaaacccacgcagacaggccagctcaggaatcccccagggctgggggccagctgccctccctccacagaaatggccacgggaaggcctcttccagagcccaggcagaggacacagaaccagaaaatggtcttcatcaaagtcctgtggggctgatgtggccagaagtggggcactcaggagggaattccatggcagtgagaaggatgtggggtccttcctgctggagctggggaaggctgtcaggcaggggcaggtatggagaggaagagggagcctcgagggtcagcggggacatcctgagcagccggactcttggtgcttgtggagcagggacattcgggagaaggtccgagcacacgcctggcactggtacttcttgacatctgagtgggtctggaggtgggcccgcaggttggagcggtcagcgaaggcacggctgcag

SEQ ID NO: 482798 - DNA, 1000 bp, Homo Sapiens
gggtgcccaggccagaggccagggaggcaggagttggaggcccaggggggcatggaggcgggggccccaggcaggaggccagggcaaggcccaactctggggccccctgcaggggatagctggtggcagagaacagagtctccacttatctgccccctacacccccgtggactgtgcccaccccagcccacttacccgcttgggtctcttggctgctgtggacaggccttcagagggtgggcaactgggccatcaggagcagccaagggggttggatacctatggctgggcctggggacagcagcttggccgggcagaccttgacctccctcctgacctccccaccctcagcctcccactcctctggtcccaccttttttttttttttttttttttttttttttgagacagtcttactctgttgcccaggctggagcgcagtggcacgatcttggctcactgcaacctccgcctcccgggttcaagcaattctcctgcctcagcctcctgagtagctgggattataggtgtgcaccaccacgcccagctaattgttgtatttttagtagagatgaggtttcaccacattggccagtctggtctcaaactcccgacctcaagtgatctacccacctcggcctcccaaagtactgggattacggccgtgtgagccattatgcacctggcctggtcccacttcttagtcgcccctgcatagggatgccagatgaaatacagatcaccacttacacttgattttcagataaacaataaataatgttttagcataagcctttccctaataacacatgggctttcctgctactaaaacatgatttgtgttctgaaattcaaatgtaactgggcatctcatattttatttgctaaatctggtaactccacctgcaggccgatgctggcaccatctctgtcactgactcatcatcccagccccttctaaacctcagttgctccagggtacaaaacaggcatcaaccca

SEQ ID NO: 482799 - DNA, 1000 bp, Homo Sapiens
gaggtaaggagttgagacccgcctgaccaacatggcgaaaccccatctttactgaaaatacaaaaattagctgggtgtggtggtgggcacttgtaatcccagctgttcaggaggctgaggcaggagaatcacttgaacccaggaggtggaggttgtagtgagccgagatggcacgactgcactccagcctgggtgacagggcaagactctctcaaaaaaaaaaaaaaaaaaaaaaaaaggcaaattttgttttatgtatctgcatgtatattatagattttaccaaaattaaaaccctacacactcaccctgggccccatgtgacctggggaatcagactctggccctggtccccagggaagttggacaggggccggcaagcttgggacatgtctgcacacgccatcagaagcacgggtgctgggggcctgggatggctgccccgcaaggctcctggaccaaggagcacgaggccacacatgagccaggtaggcactgagcgctctcagagagtagcacccccggtgctggggggactcccaggaaaggtaagtacctggtggtagtcctccatgtacttgaggtggctctcctcgcagatgagcaggttcaggtactccttccagtctgcgtgcacagcctccatgtgcgcctgccaggaagagaaggggccggtcaccactgggcaggtactgcagacaccaagggagggactgctgggatattgggctggggcatggcgggggagggaggcatctggcatctgtctgggtgtggctaccacaggggtagccagcttctgctcaggagtgggaggaggagagaggggtcacgtcaaggagccaaacagggatgccacatacggatgcccaggctgtgcagtgcacaaagggcaagtgggggctgtggtgccttcggcaaatctgtacaaaggcactgtcatggaccgaacagtgtcccaccaaatccatgaccctggccaggcatggtggctcacacc

SEQ ID NO: 482800 - DNA, 1000 bp, Homo Sapiens; identical to SEQ ID NO: 309258

SEQ ID NO: 482801 - DNA, 1000 bp, Homo Sapiens; identical to SEQ ID NO: 309259

SEQ ID NO: 482802 - DNA, 1000 bp, Homo Sapiens; identical to SEQ ID NO: 309260

SEQ ID NO: 482803 - DNA, 591 bp, Homo Sapiens
aggcatctaaatcaaatattcagtcaatgaagtaacaatggtgatattttcaatataattttatttcattttctgcattacttagaagcatcagtaggatgaaaacaatatttgtttcttaaacctgtgcacaaattaattgatgtgacacactcattaattcatgattattttcttaatgaattgattctaaagcttctccaagataggaaggcataagataaccaaaaagaaatattgatttataactgttctaatactgctcagcatttttaaagtaaattatagccgctaagccttgtataattactaataaggtaatcccaagaatgccttgctgagctaggtgtaagagaaataaactgtttcatattggaggaaagtgaacactataaatcaatatactagtgtgaaattttcgatgcgtacatcgtatcatctccacgactcacaaatgacttaaggaattcctcagctgagagtggactcctattggtggccacaatgtcacagtcttgaagacaacttcctcttgactgtaccagtaatttttccatatggattgtctaatggcagcaagacctgtagaaa

SEQ ID NO: 482804 - DNA, 1000 bp, Homo Sapiens; identical to SEQ ID NO: 120055

SEQ ID NO: 482805 - DNA, 1000 bp, Homo Sapiens; identical to SEQ ID NO: 309261

SEQ ID NO: 482806 - DNA, 1000 bp, Homo Sapiens; identical to SEQ ID NO: 309262

SEQ ID NO: 482807 - DNA, 1000 bp, Homo Sapiens
agtgggttttgtcaagtgggaaccagtaaacaaagccatataaataaataaattggtgaacattagggtacttcaggtcacttttctgtaaaagttaaagcagaggaaacttttattatgctgtctcaggtagagtggaatctcctgttttcaacaaaaaacaaaggtctgttctggtatctctttgcttcattaaaatttcagttgtagactgtagcatttagcatgagtggttctattttggagtctctaggctctcacttaggtgagagtgtgaccaaaatttaaagcattggcattcatctcagtaaccatcatattgggcttccatcatttataggtttatgatgtcttcctgatcacacatttctttgagtttttgtcatttcagccaaagagagaccctttggtatttgttgatggctgcacacaaaactttttaaaaacttttgtagaattcaccacaccaaattgtagaatttaaaaacctgtagaatttatcacaccagagaggctactagtatgactattgggaggataataccaaaagtttggagtatgcactttaggcaagatgcaaaccaagtaaaatagaatagatcaaagaatgagccagaagaatctagcaattttaaccaagtagtatgtttggtaacttttgtgattgagttgttatgatactcgatgtatttgtttatgtgcacaatcagtgtcagaaactgcacaggctcctccctgttcagctggtagggaacaattttattatgtagcattcgatggctcattaaattaaaacagggaatgagaacgagtctgaaaatgtaactttaaaagggaccactgtacatttgaacaaacaattgtgttaaagatggtgctaatgtcagccattgggtggactaaatgatatcttatgtaaaaatttgagggtgacatgatatatctgtcactctgtacactactctcagaagctacttcatgtgaaattctaatgatacca

SEQ ID NO: 482808 - DNA, 1000 bp, Homo Sapiens
gaattcaaacaaatcagtaagaaaaaaacaatcccatcaaaaagtgagctaaggatatgaatagacaattctcaaaagaagatgtacaaatggctaaaaaccatgaaaaaatgcttaacatcattaatgatcagggaaatgcaaatcaaaactcgaatgctgtactaccttactcctcgaagaatgcccaaatcaaaaaaatcaaaaaaaacagtacatgttggcatgtatgtggtgaacatggaatgcttctacactgctggtgggaatgtaaactactacagccactatggaaaacagtgtagagattccttaaagaactgaaagtagagctaccatttgatccacgaatcccaccactggatatctacccagaggaaaagaagtcattatttgaacacatgtatatttattgcatatttgaacacatgtatatttatagcagcacaattcacaattgcaaaatcttggaaccaacccaagtgtccatcaatcaatgagtggataaagaaactgtggtatatatatatatatatatatatatatatatatatatatatatatatatatatatatatatatgatggaatactatgcagccataaaaaggaatgaattaacagcatttgcagtgacctggatgagattggagactattattctaagtggaataactcaggattggaaaaccaaatatcgtatgttctcactgatatgtgggagctaagctatgaggatgcaaaggcataagaatgatacagtggactttggggacttggggggaagagtgagaaggggtgagggaaagactacaaacgaggtgcagtgtatagtgctcgggtgatgggtacaccaaaatctcacaaatcaccactaaagaacttactcatgtaaccgaataccacctgtaccctaataacttatgggaaaaaatatatatttatttaaaaccaaattttttaaatttgtggtttgaayatttgagaaacgaattttggaa

SEQ ID NO: 482809 - DNA, 1000 bp, Homo Sapiens; identical to SEQ ID NO: 309263

SEQ ID NO: 482810 - DNA, 1000 bp, Homo Sapiens
ggaattctactggtttagccacttagtatttgatcatgggcattatacaactctgtaacactcaaatttttcatctctaaaatgggcacaacaatagacctattttacaggactgttgtgagaaccaagtaagagactggaatcccgyccagaatatattccaaattccttaacttcgtcttcacagccctccatgaactagtcattacctgcttggcaagtgttcaccccttaactctaatcaaactggagattattctacttcctgtgagcacatttactggcctttctcgaccattcctttgcccttgtgatcaaggcttcctattgcctgaggaaattctcaacaacttacggggcctcccccaatgttaagcaatacctactgggagtacttaacatcaacttcattttaagtcgttagacgttatatcaactaggataaatctgagggaaagggatttgaggaaattcactgagatccaagtaccacggtaaaaaaagatccagccagtttcacagcccgcacttcccgctcacgtcgccggtagccctctgttaagggaagctcaggggctcgcccggaaactttccgggaaggtcagtcacttcctgaggctgcagaatctttttctctcgttctaaccccatcaccccctcgtctttttaaaaaacaatgctaggaaggcaaacaagggcgggataccggccccgacaagatagcctagaaagttttagcgagggcgttataccaagccaagagaggctcctcgcggcacccctggcacccccggcacccagtgaggcgagctggggcggcagtgcccagcagaaaggaatgcagggatcgccagccccagtctcgttcggggttattaaccgggcattcgagccccttccgggaggacgactcaacgtgtgctctccattccggaaacgccaaccacggcaggaggtccgcctcagcgctgccgccctgaggaaagcgggctgcggccaa

SEQ ID NO: 482811 - DNA, 1000 bp, Homo Sapiens
ccgcggcgccggcactctcacctggagctgtcctgccgggccgctgtctcgagtcgcagtgccagctctcaggggccggggtgcggataggggacctgcagggggcctggtctgccttgtcgggagggcggatgccaccaccctcggactatttgttcagccaatcagagcagccagccaccgggaagtgcctcggagactccgccccagaccagcgctgccgcttgccagccccccagttgaccccatagagcatgcgccgtagtgtgtactaagagatggagcccgtcctccgcctcgcaggctggcaggtccacagctctaccagcgcgtcgcctacgcatgctctcttagcaaaggctgttttaggcggccttctgctccgcccccgaagctcctgcagggctggcaccttctgcgcctgacagagagcatgtgggctctataaatgaaagtgaatcatgggctccatttaaagcgcttatcattgtgcctgatgcaaagcaatcttgctgctttaaattttttattattattaaagatttgttaaaagaggaaacaatattcaatatgtacatattatttattaatcattttctaaaacaaagattttattgagcacctactaaatgccaggcattagtaagaacagtggaggtatagaaaccaaccaaacaaggttcctgttctcttgtatatattctgatgggaagagacacatcatgaataactatataatacatgaggtggtgataagtgctataaataacaacaaaaacaaacaaacaacaacaacaacaaacaacaaggggctgggcacagtggctcacgcctgtaatcccagcagtttgggaagctgaggagggcggatcacctgaggacaggagttcaggaccagcctggccaacttggtgaaaccccatctctactaaaaatacaaaattagcgggtgtggtggtgtgtgcctctaatcccagctccttgggaggctgaggcagga

SEQ ID NO: 482812 - DNA, 1000 bp, Homo Sapiens
ctaattataaaatattaaaatgcataaatatttaattgataacttatgaatagtttgcactaaatagaaatgataaattagtgtcaatatcaaagaactcaagctggtagctttccttccatggataatttataaacataacacacaaaatcatctgatttcctaggaccattgctgccagatgttcaaattaattcacaaacctgtctctaattttacagtggatattttaattacagtaaaattttattttattttatagagaaaaacagagcttattcacaaaagctttttcatcatctaataattttaccatttaataaacattaagatccttcatcaactctgggatatgaagttgaagatgataaggataatgatgatgacggtgatgatgactgcaactgtcataccattttataggtgaagaaactgaggcagagttgactggtaatgcaactaggatatccacaaataattccaatttcagtcatccacagtgtggcttaggcattggggttttaaaaataattttaaaaataggactcataactgtttcttgtacatttaagtctaaggccttcttcagaacaaagtaacaaagttttgtttgttttttctgttacttctttgtagcctctggacatataaatacatacattgtttaatatgtacgttagtatttcatgcaatattgttcaaaatgctcctaatgaaatagaatagaaaaaaaatttcctttagtcctcagtattttatttaattcttaatagctatctaagatttgaactcagaaccaacaggaatacatgtttaaaaggcaccatttggtaagattcccttgtatgcctgtgggattatagccatctttgttttttaattccttaataagcacaattcttattttccattataacattatgctttttgaggattcaatcaagatcctataatttaattatttttttagttctgtatgtactcatttgaatacattttg

SEQ ID NO: 482813 - DNA, 1000 bp, Homo Sapiens; identical to SEQ ID NO: 309264

SEQ ID NO: 482814 - DNA, 1000 bp, Homo Sapiens
gatctgcctacctcggcctcccaaaatcaatgtggttttaaattttacttatttggagatggagtctccctctgtcacccaggctacagtgcagtggctcactgcaacctccacctcccaggttcaagccagcctcctgcctcagcctccccagtagctgggactacaggtgcaagccaccatgcctgggtaatgttttatatattagcagagacagggtttcaccatgttggccaggctggtctcgaactcctgacctcaagtcttgaactcctaacctcaagtgatctacctgcctcagcctctcaaagtgctgggattacagccgtgagccaccctgccaggccagccacacagtctgttgtgtaaataaagttttattggcgcacagccatgctcatacatttacatattatttacatattgtctgtggctgtagagttaaccaacagagaccatctgctccacagtgccatttttttttttaaagggagtcttgctgtgttgcccaggctggagtgcaatggcgtgatctcagctcactacaacctccgcctcctgggctcaagcgattctcctgcctcagcctcccgagcagctggtattacaggcgcccgccaccacccccagctaatttttgtatttttagtagagatggggtttcaccatgttggccaagctggtctctaactcctgacctcgtgatccacccaccttggactcccaaagtgttgggattacaggcgtgagccaccgcacccgacaaagccaaaaatattgacagtctgccccttacagtaaaagtttggtgaccaagccaggcatgatggtgcacctgtgattccagccactcaggaggctgaggcaggaagatcacttaagccctggaggcggaggctgcagtaagttgagatagcactactgcactccagcctgggcaacagagcaagaccctgtctcagaaaaaaagaaagcgggggaggtggggagagagagctga

SEQ ID NO: 482815 - DNA, 1000 bp, Homo Sapiens; identical to SEQ ID NO: 309265

SEQ ID NO: 482816 - DNA, 1000 bp, Homo Sapiens
  misc_feature (940)..(940): n is a, c, g, or t
tctagatgtagtgtattttttctcagtcatacatatcaagacttgattaaaagtttggattttgtttaaaaaggctttattcattttttgatcagggaaaaggacaatctcaatgtcaactcgtcacctaatcataaatttgaacttacaggattcactaccctagacaccgcacctactgacaacacaacttaaaaatgaacttacttccattccctaaagttgcatgttgaatgaacagaatcccttctaacagccaacattggtacttggcctaagtttaagaatagcaaaacagcagcaaaaaagaggccaagagcattataatgtgatagcccaggaagtagaatcattgttaagaaagttgcaggcaccaaattaaaaaaaaaaagggagggctcatgagcataagaaacttaccagttttgtgagatcacccgttgtgtgagatcaactactctgcctgtgaacacgtatgccaatcccagtaaataacactgaggccaaggtcccaaaatccaactacactgaatgcaaaatccaaagcttattattattccaggtcctctgaaacctggatataaaacggattcttttcaatgcacccagagggtccactgtaatgactcagtcacatttgtaatgacttagtcacatttgtaatgactttgtcataaccaagataccttttccactattcctttctgaatatgtaaatatttaactacttagttcatgcactgtgtcaaaaactagattttactatcaagactttttctaaactcacagagcattaacagctaatacaacttcctcaggatgcccaaacagaaaacattttgttcaatcttgtggcggctctgagaaaacacaactaaatctatttgcactatttaatttcgccaactcatacttctacaaatcttgggttgtactactncaatgctcttaacatagctctacagtttacagtgctcctttgtatctgaacttttatcag

SEQ ID NO: 482817 - DNA, 1000 bp, Homo Sapiens
cgactgtagaactttctaccttccagcaaacgattttgactattaaggctctaaaccaatatattccatagcaatcattttccaaaatatacttggacttgtgcttattcctctgaatctcattaatgactcaatgaaaattaaattattttcacattattatgattagtataattatagctactttataataataataacatttattatgacttttatgggcaaggcactgttgtaaacatttgcatgtatttgcatgtattgagtcagattttttcttacccttagttttctgggatgaggtcactgggactccgagcagttgtgtcctgctcttattcatcatttgtgaagagcaaagctggagtctgaacccagcctatcctgatccagacctatgctctgaggtacagtgctgactgtcttttagtaacgcagaaatgaggaataataattatgtgccatgaaatgccaacccactctgtatgtctcaatctttgtgtccaagattttccctaaaactggccttttcttagtttttgtgaagttccaggtttaaactatgacctgttcagggatctaaagctgaaccatagtgctctgtgactcacatgatatgttgcagctttttctgtggtgttctctgtgacttgatcaaagtgaagaacctggaagagacatgaagcgggacaagaaaactttactcaaaagatctgtttaagtcagtggtctcacagttatgggaattcctgcacagccccctgtgctacccatcagaccaccacatctattaccatctgcgtgctagccgacggaaccagagaaaaactgcaacaggacaacgtaatgatgctgatagctaccttgctaatttgttgtgcagtgttgtctttggctcctaagaggaccatccctaatgctgatgtgatgctgataggggaatagaagatgttgttctcttttgattttctgaactgttggaacagatcgaacatgaact

SEQ ID NO: 482818 - DNA, 161 bp, Homo Sapiens
caaatattcctactagctgccttccttacaacatgtatcccatttgaaatttcacatttgcttgagttatcatttgaataatacctgattcttctgctaggatgtactctccatgaggacaagtcaatttctgttcatcattgttatctccagtgcctgcc

SEQ ID NO: 482819 - DNA, 1000 bp, Homo Sapiens
aagtgacccaaggcccaaagggcctgaactgctttgccctttctccatgacccaacagttgtaaattgagaaattggaaaatcggagattacatacaacactcctcaaatccatgttgacttcttgagtcttaaaaagatacttcctaatcactgtgcaagacaagtacttgactagactctgaccttgctcaagttcaaaagcttttgggtctccagaacttctctcctgaaagctacacttacttgcaaagttaacagaagaattgagatattctaaattgatcctaataaatattggtcaccagactggaaaattctggttaagaaaaaatattttactgaattatctggataattattctggttcacctgatttcttttgccagaatagatttaggctgtttaaaattcagatattgaataagtgacctatcccaaattaatctccaactgtgtatgttatgttgctgtttagtcattattttttctgacccaaaaagaagacaaaattctgttcatttacatggtttattgttgtaaacattaaaattgtctttctcaaagaaagaatttatcagaaaaaaaatcagcatctctaactgtcatacaccatagaaaaaaaggcagtgactcatatcatgtgccatactagaaatatacaaagaaaaatactacagaatatggcaatattaaaattcttactcaaacaaaataataaattaactgacaattttagacataaaaaaaattcaaagtgctcagttatttccagggagttatgtatattataagcactctggaaacagtcaaaagctgctgcatgcaagttttgtttagctttagacaacaaaataatcaagatataaactttctttttatcaacatcaacggtacatacaacacttacaaacaaggaatgttggacggtgttacaaacactatgtgtcccttttgtcaggattttctgatgtgtaatacttgtgcccacctattttaca

SEQ ID NO: 482820 - DNA, 1000 bp, Homo Sapiens
ggtatttgggtgtttctacctcttggtgagtatgaataatgctgttataaagagtcgtgtacaagtttgtatttagacacgtttttgtctttcttgggtgtgtacctaggaatacaattgctgggttataggacaaatttatgtttagctttttgaggaactgccaaaacagactctgttttgcacagtggctgcacattttgacattcctaccagccatctgtgagcattcctattctttttcttaaagtcatcttaatgggtatgaagtagtatctcattgtggttttgattcgcatttctgaaatgaccagtgatgttgatgtgcttgttggccatttcacaggatctttgcatgttatttaaaactattaaaaactatagaggataccaggctgggtgccgtggctcacgcctgtaatcccaccactttgggaggctgagttgggtggatcacttgaggtgaggagttcgagaccagcctggccaacatggtgaaaccccgtctctgctaaaaatacaaaaattagctggacttggtggtgggtgcctgtagtcccagctacttgggaggctgaggcaagagaatcacttgaacccagcaggcagaagctgcagtgagccgagattgtgcactgcactccagcctgggcaacggagcaacactccatctcaaaaaaaaaaaaaacaaaaaaacaaaaaaaaagcaccaaaaaactataaaggtttttggttatgtagattatagctagcaatatttatcatatttataataaaaaccaagactttttaaaaaatatcatttattcttttataaacaatagcaataaatttattatatgttaacagcagagtgatgacatcatcacgtatcacatagcttctggaaaattccaccatacacttttgagagaaggacagataaatggtcgataacatcttagtattatcatggaaaagttttgatcttatagacccctcaacacccaaaagtcgtaat

SEQ ID NO: 482821 - DNA, 219 bp, Homo Sapiens
gacttttacctttcccgttttctgaagcacatgttaaaatgtcggtttgtttacttactatgcctaaattcaactggggaaacaaaagaacttgttaacctcttactgatttcaccgttgccaggcacacactcatactctctctctctctctctcacacacacacacacacacacacacacacacacacatacacgaagccaagatgactagaagatc

SEQ ID NO: 482822 - DNA, 923 bp, Homo Sapiens
catattcactgggggcagtgatcatttctaggtccacagaagcaaacagagtgagatcagcccagttcacaggtgatccacagaaagagaggacaggtgagaggggaagtactcaactattaatatcactcttgtttatatttggagctttgcaacttccagaagtcttgctttttggaccccatgtaagccttccctgtgcaattgagaggcaattgcagataaaagacctacggctcagagaggtaaagtgacttgccctaggtcacacagtatgtaataggctcagtaatggccccccaagatgtctatgttctagtctctggaagctatcaatgttactttatgtggcaatgactttgcagaaatgattaagataaaggctcttgaaggccaggtgcggtggctcatgcctgaaatcccagcactttgggaggccgaggctggtggatcacgaggtcaggagatcaagaccatcctggctaacatggtgaaaccccgtctctactaaaaatacaaaaattagccgggtgtggtcgtgggagccagtagtcccagctacaggggaggctgaggcaggagaatggcgtgaacccggggttcggagcttgcagtgagccgagattgtgccactgcactccagcctggtgatagaacaagactccgtctcaaaaaaaaaacaaaaaacaaaaaatgaaaaacaaccctctggaggaaaggtcatgatatagaggaggatttgttatttaaattgagggtatggactctggcactgagcctgctggggaagcctatctcagatttgaaaagggcaaaatgggaagaagccatcacctttaccattcccactccaggaagttttcctagaacgatgactgtccaagtgtggtccctgggccagcagcatcaggatcgagtcgact

SEQ ID NO: 482823 - DNA, 1000 bp, Homo Sapiens; identical to SEQ ID NO: 309267

SEQ ID NO: 482824 - DNA, 1000 bp, Homo Sapiens; identical to SEQ ID NO: 120056

SEQ ID NO: 482825 - DNA, 250 bp, Homo Sapiens
cccgcccagcccagcccaggccagtccaggtcagtccagcccagcccagctcagcccaggccagtccagctcagtcccgcccagtccagcccaagtcatcctagcccatcccatcccagcccaggtcagcccagcttagtccagctcagcccaggtcaacccagcccaggccagctcagcatctacgtattgagtgcgaagggaggtgcccctattattatttgacaccccccctgtatttatggagggg

SEQ ID NO: 482826 - DNA, 1000 bp, Homo Sapiens; identical to SEQ ID NO: 309270

SEQ ID NO: 482827 - DNA, 1000 bp, Homo Sapiens
tccatccgagctcgggctaccggagcttgtgtggaccagggcagagtggtggcctgtgcttctcactggcactctggctgggtgcttgtctgctggagggtttggaaagcgagtcggctcactagagctattgttttacaccacctgtttgtgggagcgacagctgggctgccctcagccctggagcccagggagttactgggactgtacaccattacagatatgcctcactttacacaattgcttacccttgacaagctgagtatgaactgcattatattttaaatgcaccagtagtcagatcttaatgaaaaaaaaaatgtataggaaggaaggaattattttaaatggtgagcaaactgcctctcttttgtgtaaaccagaacctcatcctctgtgggttgacttgattagggtcatttggtctgagtagatagtcagctgtttgtcctaaaccacaaaaatccacattctgcaaacatggcttcagtttcatttcctctgcttcagtgttaggctgagggtgccgggggcttttctgactgcctggatttcagaaaagtgtagctggtgttgagtctgctgctgggaagcccccacgttgattgggtttggtttttaacaaagacagcttcttccataaaactggctttactggcccccagagtggctgttccaacccctgcctctgtatcaggcaatacctatcccacacgaaccattagctggagcaaattgcccacgtcctatgcacttgtgattcaagcgaagagtaattattgggaaaaagtgtcccacccgcatcagaagtcggttccggggttcctggctccttccatccggccctcttgctactctcactcagggaagcaaagagcagagtggttcagcttttcaattatcttgcttgaaaaacatcctaaaaaccagcagttagtaatttctcagtctgagaagtattgttaccctagctgtgcttctttgcagggtgtgaggtgag

SEQ ID NO: 482828 - DNA, 1000 bp, Homo Sapiens
caaaaaacaataaacaaatacctcttccctgacaagttagttttagaatcagcactagataaggagtggggcaagttcgtgttctctaagaaaaaggggcctaggggataagagggactagagacactacctcatgtcaatctcattaaaagttgtcagcattgcacatgtattctgggcctccttcagacgctgagcaatgcgttgccgcatcctgttcattttctcctgaaagtaagagtggaacaagcattgacaatctgatctctctgggtcaagcattccccgtgtagtcagaaagaacacggcttgccacgagtagatggccaaggactacagtatctaagtacacgagctccaggcttccctttcctgtggtggccctttctcctccaagcaaaaacatgcaaacacaggccaaaactactcactcagatgtgcctaaagcttgaccaagaatgaaggctcagaaacagtgatttaaaaaccaaaacccatttataaaagaatgtagtgtagtgtagtctagccaacataagaatcataagaaaaagggcactttctgttgataaagatttgcataagaatagctatttgtggaacagaacctcatgagcaacaaactttcgaggctatcatatttttaggaagtattctcaggcacaggaaccacaatcctgaccatacttccttgaggcttttatgtctgcacctgacagctattgctactgagtattatcccttagctacagctaagtatcccagtagtataggaatagagctcactaaaccacctctctgaacgtgtgacatcgtggaggacggggtgagttactaagctaccacccctacaaatatttaacttacccaaggctttcacaggtagcataatatagtaggaaaaccactgaacaagtgttcagaagacctcaggttctagtcctatcatttgatggttatgtgactatgaagaagttatatcctaaactccctttatcaa

SEQ ID NO: 482829 - DNA, 1000 bp, Homo Sapiens; identical to SEQ ID NO: 309271

SEQ ID NO: 482830 - DNA, 1000 bp, Homo Sapiens; identical to SEQ ID NO: 120057

SEQ ID NO: 482831 - DNA, 1000 bp, Homo Sapiens
gtgaactgaagggaaagtgataaaggagccaactgtggaaggggaggccttggtgcggtgggagtatctaccccccaccccgcttaggtggcttatctgaccccagacaggacgaggccgctctggggggtaggagggggccggggagggaggcctccactctgacacctttctgccgttggactattgacctcctgctcctccaggcaccccttacctccgggctggtggctaacataagggggttggcgggggggattaaggcaaccacctcctctcaagaccctttccggcccttatcccaggccccacctgtgtgtgaggccccctcagaacttatgcaggggaaaaggaagcctccaccagccaaacagagctgccatgctatcagacggttcctatataacgtttatttctggaagttaaagtagatacagcaatataccaaaaaaaaaaaaaaaaaaaaaagacaaaaaacctcacaataatataaatttttacactatgaagtacacattggaatttgaatgcagtggccaggacagcagcttataaaccaccttataggtaggtaagcaacccacgggattccctcggctgggctggggatggggagggggcagtggacaggaagcgggcagggcctgaggaccctgttctttaatgggccacaacagggctcagctcctctcagaacttttgctacaatcagagttaagaccagatacatgctacctaaggccatgaacttgacaatatctgctccagagaagccctgaaccctcgccctaggtccctatgatttaaacccaatggtaagcccaagtctcacctttctaaatattctgtttatcagttaagcttattatgtactgaagagtgttgctggagaagtaagagctctgcatgacacatcaactgtctccaggcaggaggactggggcgaaccctgttcatcttagagaaggtcgtctcccccttaattcagagaccagctaat

SEQ ID NO: 482832 - DNA, 1000 bp, Homo Sapiens; identical to SEQ ID NO: 309272

SEQ ID NO: 482833 - DNA, 1000 bp, Homo Sapiens; identical to SEQ ID NO: 309273

SEQ ID NO: 482834 - DNA, 1000 bp, Homo Sapiens
tttgacagcagagccagggctgcaattctggtttcttgaccctgggattgaaaaaaccacatctctgacctggcacctggcatggtggtttatgcctgtaatcccaggactttgggctgccaaggcaggaagattgcttgagcccaggagtttgaggccagcctagacaacacagtgagaccccagtctctacaaaaaattaaaaaaaaaaaaaaatagctggtcatggtagggcacactggtggtctgagctacttgggaggctgaggcaggaggaatacttgagttcaggaattcaagaccagcctgggcaatagagtgagaccctgtctctacaaaaaaatgaacaaaattatctgggcatgctggcgtgcacctgtagtcctagctattgaggaggctgagatgggaggatctcttgagcccaagaggtcaaatctccagtgagctatgattgagctactgcactccagcctgggtgacagtgagactctgtctgaaaataaagaaataaataaagcaagccaaatttctctgcccatcaaagagtcaaattgactttacagattagcagagttttcactgtgagttcttaattcagcatgcagcccaggttcccaagttcaggactgctgaagacagcccctggggactttctcaagagagaaggagaagccccagctggattccgggccggtcctagggcacagccagcagcctgtgtgcaactgtgtggttgccggctgttccctgctcgggcctgcatgggagccagcgacattcagtggcttcgttcgagatacgatctttcaggtctgtccagatttgtgagctgcatgatctcgtgcggtctgattgcgaggctgtttggatgcacgtagcctcttgtgcatctctccaaagttgcagaaccaggtcacagatgcagaccaagcttagggcttgggtttgcctcacagaacattcccttcctcatctgactgtctaatgctggtccaac

SEQ ID NO: 482835 - DNA, 1000 bp, Homo Sapiens; identical to SEQ ID NO: 120058

SEQ ID NO: 482836 - DNA, 1000 bp, Homo Sapiens; identical to SEQ ID NO: 309275

SEQ ID NO: 482837 - DNA, 1000 bp, Homo Sapiens; identical to SEQ ID NO: 309276

SEQ ID NO: 482838 - DNA, 1000 bp, Homo Sapiens; identical to SEQ ID NO: 309277

SEQ ID NO: 482839 - DNA, 1000 bp, Homo Sapiens
gatccagcagggccagcctcatgctggctgagctgcctcaacaccctcctccgcaggctgcggctctgacctcttcttggggagaagccaggaggattctgggtaaacacagggactgaacgtgtacgttgagctcatcttcctcctgagatcccagcataatgacagcgaaggaatgaaacagaggggcccatggtaatgaagagagctagagaggaacagcagcagatgccagattgcaacatgattttggaagatgggaaggggacggagggtgggagcagattctacagggtgaaggggacatgctagctgagcctgcagaggagtgcggggaagactgccttgccccacagaatgcagcaaagtgcaggacttggaagcaccaggacaggcagatggcaggggtgaaatgtgggcttaaaaatctagtggcagttgggcacagaggctcacgcctgtaatcccagcactttgggaggccaagatgggaggatcacttgagtccaggagttcaaagcagcagtgagctatgattgggccactgtagtccagcctgggcaacagagcaagagtctgtttaaaaaaaaaaaaaaagaaagaaaaaaagacaatccagtgaccaggcaactatcccctactgcacccctggcgggagatggaagatgtacctgctgaggaaactgcaaataacctatggactccaagctgggaggaggagcagggagcactgctttcagaggactaactgggaggcttcagacagagtgatcaaagccctggctgccttccggtcctgtacacactgggggtcttctgccaggatggagactgcaagtccgtttggtatagaatgaactgcattcccctccaaatccaccttgaagtcctaacccccagtacctctgaatgtgactgcagatagagtctttgcagaggtaattaagttaaaatgagacaggaataatacaaggtggccacaggagaataaaaattccag

SEQ ID NO: 482840 - DNA, 414 bp, Homo Sapiens
agtacaatttccgttttatttttctccagggaatagcctgtcttcagtcttcaagaactcagctccttacatgggctttggtgggggacgtggggcagcacccgcaggtctaaatcggggtgggggtgttcggtccttgcgggcttcacgagatcgattcctgactactttgctgtgaattacacaactcacacagtaatgtagcttcacatacagcttgggaagcacataggcatcgaagacgctcgcttcagaaatgtccctgactgctgcggcctccactatgttccgaatgacgaatttcttaatggccttgtccttgggcacgcatcgggcacagttagtgcagcgaataggctgcacgtggccgcggccctttttggcacgaccattgttccttctcttctttgtcat

SEQ ID NO: 482841 - DNA, 358 bp, Homo Sapiens
ccatccaacatctcagcatgatgaaacttcggctcactccttggcgcctgcctgatcctccaaatcaccacaggactattcctagccatgcactactcaccagacgcctcaaccgccttttcatcaatcgcccacatcactcgagacgtaaattatggctgaatcatccgctaccttcacgccaatggcgcctcaatattctttatctgcctcttcctacacatcgggcgaggcctatattacggatcatttctctactcagaaacctgaaacatcggcattatcctcctgcttgcaactatagcaacagccttcataggctatgtcctcccgtgaggacaaatatcattctgagggg

SEQ ID NO: 482842 - DNA, 1000 bp, Homo Sapiens; identical to SEQ ID NO: 309283

SEQ ID NO: 482843 - DNA, 210 bp, Homo Sapiens
cctgaaatgtcgatgacagagccagactcagcaaggcgtcctgcaggctgtcggcgcatggctgcggcggcggcggcggctcgtccggcttgaggaagacctgctggccccgcctgaggaattggacaacagcgatgaggatgtggtgcagcaccaggaccatgctcgcagccgcccgcccgcccgccggcccggccgctgcgctcggtc

SEQ ID NO: 482844 - DNA, 1000 bp, Homo Sapiens; identical to SEQ ID NO: 309284

SEQ ID NO: 482845 - DNA, 595 bp, Homo Sapiens
tgtgggaacctagaagcgggagagattagactgaagtaagattttggggtaaggggtgatattgtgggcttgttaaaagcagcacttgtcatatagagtgattagtgatagcctggatgcagttttgtaggaattgagagattaatcggaagacaaaaggcccgaataagagatggaggaagataggtattacaggactaatgattggaacaagccaggatacccagttagagagtgaccaggtgggtccagcataattagttgcctgattagtgagtttttgagctctgtctttgagttttttgatgttaccatatgccaggccagattgatttaagtaaaaacaacactcttcattaagaaatatacagagtcctcctttttcagcagtgagtaaattgaggccttggcggttctgcaggacaactgcagctaaagagtcaacctgggcttggaggacagataaagcttgtgatatatctgtaatgctagcagagaagtcattagagaggctgcggaatgctgtgacagaggttgagatgcctgctattccagttccaagtgcaagagtggaggcagaaagtcctaaaccgac

SEQ ID NO: 482846 - DNA, 1000 bp, Homo Sapiens
agctacttggggggctgaggcaggagaaccgcttgaacccgggaggcggaggttgcagtgagccgagatcgcgccattgcactccagcctgggtgacagagtgagactgtctcaaaaaaattaaaaaaagaaagaaatagcaggtcagcatgcagatgccaccggggggcaggtctcatctggattgaaggaagaactttctggcaatgtcaggaaggacactaccctgggaggcagctcattctttcatttactctatatgtgtttactatgtgcacacttcagccctggtagtctctagttgctgaggatatagtagtgaacaaaacagctaactgcctgccctcacggagctgacccactggtgtctggacatcctgggagatgaggtggaacgtgcaggggccatgtggagcattagcttggatggacttgacctgctccggagattccgtaactttcttggctttaagaaacctagtttgttttcatttctctgatacagactttcaaaatttggaaagaacttcaccaagactgtattgttttcatggtttccagtagaagcaagcctgtgaattagtatatagggatgcaacaaaatttttttatatggcagtggtaaaaattgcctttggataagtcttaggaaaagaaaatttctccatttaaaaacaagctctaagtctagtgtagtggctcatgcctgtaatcccaacactttgggatgctgaggtgggaggattgcttgagcctaagaattcaagacctgtcagggcaacatagtgagaacccatctctagaaaaataaaagcctggcatagctgcacgtcggtactgctactgtactgtactggaggcagaggcaggaagattgcctgtacccaggagttcaaggctgcagtgagccatgattgtgccactgcactccagcccgagccgcagagcaagactctaagaaagcaaagaagctccagttggtctatttttttaatgtttc

SEQ ID NO: 482847 - DNA, 1000 bp, Homo Sapiens
gagatgcttgtggtttattgaagagagcaaggctggtgggcgtggactcaaagcatggcagcggcagaggctggagcagttggggatcttcagcttctaaatgctaattacacagtgagctttgggctattttttcctaaaacaaatagacaaagaaacagaaaaacccaatacaacagtgaatgaattgcatagttaggcagagatgacgagccacagaaacttcaacattaaccgagaggtgcagtcaactctaggaggaactaaggtagtaagggcttggattgtttctcaaaagcctcttacaaaatagtaaggggaggctgggcgtggtggctcacgcctttaatgccagcactttgggaggctgaggcgggtggatcacctgaggtcaggagttcgagaccagcctggcaaacacggtgaaaccccatctctacaaaaatacagaaattagctcggcatgatggtgggtgcctgtaatcccagctactcaagaggctgaggccggagatcgcttgaacctgggaggtggaggttgcagtaagccaagatcgtgctattgcaccctagtctgggcgacagagcgagactctgtctcaaaaaaaaaaaaaaaaaaaagaaggagatgtctagaaagatcactgtgctgcctgcctggggacagtggcactgtgactctcctctctggattagaaacaggtctgaaaactggggcaatcctgcagccccacttggggaagccacttctgttttttttttttttttttttgagacggagtctcgctctgtcgcccaggctggagtgcagtggcgggatctcggctcactgcaagctccgcctcccgggttcacgccattctcctgcctcagcctgcccaagtagctgggactacaggcgcccgccactacgcccggctaatttttttgtatttttagtagagacggggtttcaccgttttagccgggatggcctcgatctcccgacctcgtgatccgc

SEQ ID NO: 482848 - DNA, 1000 bp, Homo Sapiens; identical to SEQ ID NO: 309287

SEQ ID NO: 482849 - DNA, 1000 bp, Homo Sapiens; identical to SEQ ID NO: 309288

SEQ ID NO: 482850 - DNA, 1000 bp, Homo Sapiens; identical to SEQ ID NO: 309289

SEQ ID NO: 482851 - DNA, 1000 bp, Homo Sapiens; identical to SEQ ID NO: 309290

SEQ ID NO: 482852 - DNA, 1000 bp, Homo Sapiens; identical to SEQ ID NO: 309291

SEQ ID NO: 482853 - DNA, 1000 bp, Homo Sapiens; identical to SEQ ID NO: 309292

SEQ ID NO: 482854 - DNA, 1000 bp, Homo Sapiens; identical to SEQ ID NO: 309293

SEQ ID NO: 482855 - DNA, 1000 bp, Homo Sapiens; identical to SEQ ID NO: 120062

SEQ ID NO: 482856 - DNA, 1000 bp, Homo Sapiens
aattcatgtttctaccaacagcgtatgagttccctgttctccacatccttgtcagcatctattgttttgttttgttttttgtctttttcatgatagtcattgtaactggagtaaaatgatagctcattgtagttttgatttgcatttctttgataattaatgatgttaaacatacttatataccatttgtatgtcttttgcaaaatgtttattcagatctttttcctattttaatcagattatatattttttgccatcaagttccttgtatattctggatattagtcgcatgtcagatgaatggtttgcaaatattttctcccattctacagatgtctcttccgtctgttgattgttttctttgctgtgcaggttttggtttaatatagcaccatttgtctatttttggttttgttccctgtgcttttgaagtcttagcaataaaatatttgcctagtttaaaatcttgaaccactattttcttctagcagttttgtagttttgggtgttccatttaagtctttaatccatttcgagctaatttttatatggggtgaaagaaaggggcctagtttcattcttctgcatatggatatccagtttccccagcaccattactgaagtggatccattccacttggtgtgtttgtggcacttcattggcctaacgtcattttagtctgtctgctgtttgggattttaaactctcctcctttatatgcatttgtctgtcaggacatgggaacctcagtgggtttctctccacatttctccccgcgtacagacactgtcgtgtttcttcttctgcagtcctcttgcattgttgctagacatggtttcaagagcacaccactgagaatccatatgaaaagggaagcatctctctcatttttctccttgcacgtcagacaaatatcacattttcctggcctagtcaccccttatcaacctgaagcactgtatatatgtgtgggggaggggggtggagaactgggttctt

SEQ ID NO: 482857 - DNA, 1000 bp, Homo Sapiens
tctgtggaaattggtaaattaatgaattaagtgattatacttttattttattgaccataaagtgtcaccaaatagccctaattgatgagggaaaacttttattatagaaaagcattgaataacaattatagatgaatgacaggggaaataccaccaccatttaatagctcctaataagtatttgattcaggcaaggagcaagaatgaatgctaaaatcattaactggcaagttgatggtgctaaaaatactggcacacagataatttcctaattgtaaagggaaaaagataactttacaatggagaaatctgattgccactgtcatgaaaaatgaatcaaccaatcattttatgcctcctgataggttgcaacatgaagtacctaacatcatcaataacttattttgttaaactgtggttaaatataaacaacataaaatgtactattttaactgttttaagtgaacagtgacattaagtgcattcatattgacatgcaactatcaccaccatctatctccagaactttttatcttcctaaacttaccacccattaaacactaacttcctaccttctcttcaaagctatggtgaccatcatcctactttctgtctctaagaattcgactactctaggtaccttatatatgtggaattatacaatatatagtgttctttgtgactggcttgtttcacttaccagtgcttcgatgttgtagcatgtgtcagaattttcttctttgtaaaaatgaataatattctattgtgtatattatactaatcattgtctgagcattgggcctatttattccccctaaaattatcatttatgaaccctcaaaatggccatatttctctgatattctcttcccctattaagatggatatacaactatgtgtacctcattcggtcattggataactatcctgaaattctccagtgcttatgcacattaaatttatttgtatgcctttttctcctactaatctgcctctttat

SEQ ID NO: 482858 - DNA, 1000 bp, Homo Sapiens; identical to SEQ ID NO: 309295

SEQ ID NO: 482859 - DNA, 1000 bp, Homo Sapiens; identical to SEQ ID NO: 309296

SEQ ID NO: 482860 - DNA, 1000 bp, Homo Sapiens
caattaaggaaccactgtgtagcagtcacaactgggtcctttatcttgctcagtatggagggggagaaaaagactctggaacaaaatgtgccgtagcagtttcacttgacctttctttactgactaggctcattcaaagttgtattttttttttttaaaagaagaagcataaaaggcatcaaatggcttagctgtttcctttaagcactgtggctgtagcggaaagaggtctgtatgccataggttgaagaaaatgattcatcctgtcttttactcccttaggggattgctgaaacttctcctccttcactatagcgtcctatacactctcatccaaatttattattcttatctgcttttacccacagagttcaaaatagggaattcaggttgacctgggtgatgtcaagagaaaaaagagagaagaatgtcacagttgattctagggcccccatgaggcttcgtggacagaataaagtgaattgggatcagccctgagaaaatacatatttgctaaacaggtaaaatgaatcttcagttttgtcagggattgacacagaggcattttagctaataagcatccttacagaattttaattgatcctattgacaaaaaccgaattagctcaatttttcacaaacaggtcttgtagaaagagataattatgtgctctgttaaataaggacttctaaagcagggtataggaagcctaggtgcataagatgatcatttggagtactgaaagaaaacttaatagaattaaaacttctatttatacatctattttacctaaaaatatgaaaaaaattactctctagaatgtgtatgagttgaaacccacacccttcagtcatgtctaaaacacagagggccaggtgttaatgagagagcgtgacaggatcaaaagtggcaactagttcctttgtttttatctgttgttgctatcatagtttatacagaggtgaataagttgatctattgattgcattatctagattt

SEQ ID NO: 482861 - DNA, 1000 bp, Homo Sapiens; identical to SEQ ID NO: 309297

SEQ ID NO: 482862 - DNA, 1000 bp, Homo Sapiens
tttgagagacactctgggaaaaatctgtgttccttgagatgtaattggatatgtaagatgaggcagagagtgaaatgcaagatgactctcaaatttttgctttagtagctgcagagatggcagcaccacactcctgagagtgtatattgcaagtggaataagataataagaccgtacttgagcatgttacatttaaagttcatttattggacaggcatggtggctcatgcctgtaatcccagcactttaggaggctgaggtgggtggatcatttgagcccaggtgttcaagaccaccctgggcaacatggcgaaacctcgtctctacaaaaaaattaaccaagcatggtggcatgtgcctgtagtcgcagctacacaggatgctgaggtggggggctcacttgagccctaaaggttgaggctgcagtgagctatgattgtgccacagcactccagcctgggtgacagagtgagatcctgtctcaaaaaaaaacacaaaacattaatttgcttattcattcaaaaatatttgtagagaacctcctagatgccagagagtacattaggcacttggcatgcagcagtggataaaacaaacagaaatttctttcctcttgaagctcactgcagtaggatatctgtggacatcccagtaggtgatggaattggttctggagcctagatgaaagattggaagccaggtatggcggctcacgcttataattccagcactttgggaggccgagggcagcagatcacttgaggccaggagtttgagaccagcctggatggaaatatggtgaaacctcatctctactaaaaatacaaaaaattagccaggtgtagtggcacatgtttgtaatcccagctacttgggaggctggggcaggggaattgcttgaacctaggaggcagagattgcagtgagctgatattgcatgactgtgctccaccctggatgacagagtgagactccatctcaaacaaacaaaaaacaagaa

SEQ ID NO: 482863 - DNA, 1000 bp, Homo Sapiens; identical to SEQ ID NO: 309298

SEQ ID NO: 482864 - DNA, 1000 bp, Homo Sapiens; identical to SEQ ID NO: 309299

SEQ ID NO: 482865 - DNA, 1000 bp, Homo Sapiens; identical to SEQ ID NO: 309300

SEQ ID NO: 482866 - DNA, 374 bp, Homo Sapiens
catcctgactttctcctccctgttagaacaagcccctccttagcagaggcacactccagccgtacttggtcatgcagcttgtcctcaggacctggctttgtcttgtggtgcttggcatccatacagacattgaggagatcagtcctgtcctgggcactgcacatggtggctacacagaccagaagcagcagaagtggcatccatttccagaccatgtctttctgtccctgcaggcggacgtagggtagggaaaccaagtcctgaggggaaagggctccaagctgggagccattcacctcctgcctcagtctccccatccctacggtggcaaatgaggtcagaccctgttccttcgatgctggggccctgaagct

SEQ ID NO: 482867 - DNA, 1000 bp, Homo Sapiens
gatcaatcaggagagcttcctgtgggaggaggcttctctgaggtctgaggtctgggcggataggacacgggagaggcaagcactggaggccaaacagaaaccacctaaatccctgcctggctgccggcagggaggagggcgctgaggttctctacagaatgcacggtgggcagagctgtgagcgggcgctgaggaatgtgccttcacctgtctcctctgcccacctggcacagctgcacagggacaccaggctctggtgacaggtgactcatgcccatggtggcccacagtcacaaagaaatggaagtccttcagaaatggaagggatcttagagatggtgaagatggtttctgtgtctcaggaagggctctgggctttcgggcaagtctcctcagctctcagggagtgagggaactcacggcccctcgttgagatctgtgcacctgcagcctctcaccgctgtcaccatgccccgcagttctctctccaagaccatttccagtctcttcctgcagggctatgcattgcctcagctccttttgaggagctgttgagaaaagatcgttttttaagaaagccttatcgttcctgtgcatgtgggtgatgtcatcacactctgccccctggacgcagatcctccatgctgcccccagtgggaacaccagcctgtgctcagtgctgcagagctggtgtttccctgccaggcggagcctcaggggatttatcgcctcatttgtttgtgggttggctttttccttttataagttttcatcggaaactgattttaccagttgtatgtcacacagccctcctgcctggtccccaagatgagaaattacaatgcatgatgcatgaggctgattttcatgtagatgtgttcgctcgggctggagctctgggtgtggtttgttcctgggagaggagccccaggcactcactggcatctccatgtttggatgaaaccctgtgcaagggcaagggtgggagcgtgtgtcccac

SEQ ID NO: 482868 - DNA, 1000 bp, Homo Sapiens
gaacaggggaagtttaatataaagatgaactctactcggagcatagagtttaaaaagagttctacacaacaccctagggatgaggaagaatgcctcagggaagaaagcacagaaaaggaggtgccctcccgaggctgggactgagacctcctcgctggagaaggtgtggagaggcccctgagggtgaagttccccgggttgctcgagccagagtctgcacagtcacagggcaagacagaaaattctttcgagagggtgggcgctcacagggaatcgggaagcagagcccacctgcctacacctgaaagccacagccagtgctgggacctctctgaggtctgcagactccaggcagagcactcctggcagctgtgcagcaggagcaggaaggaaacgacatgaaagcccctttctccccagtgtcccagttcaacaccgtgcacgctaccaaggagaaacggcgcacgggccccacccacgactgcagagcaggcaggggagggggatctagagctgaaaggcaatacatggataacgcgcacgccccactcccacttttatttagcaagagtaaatgcagcctaatgacagggcgtgggaagacctcctgctcaccagtgtgggcagagtgtagcgtggcctgggctcctaatacaggtaaattgtctccaaaggactagtaaaggtgactgggtcatcctcctgcccagggacactgattagagaaaatccgtctgtgctggcaatacggcagtgctggacactcggaattcccttgaaggcaaaagcaaggaacagagcgtgattaggtactggacacctgccaagtgctgggctctctccagtttacagatgaggaaactgaggctcctcgagttggagctgggatgccagcccccatggacctggcagaacacgctcttgacagccccacagggcttctccctagggcgtgcccttagaagattccaggcagcaggcggtaaggcactgcggcggt

SEQ ID NO: 482869 - DNA, 1000 bp, Homo Sapiens
tgtccatcccagtgtgcagtctccacaggggaacaaccgacaaatcagcagtggtttaatgaactgaaagcatcctgggaatggtgctattagcctcactgaaaatcatgaaaagggctttagaaatccttcatttataggtgagtaaattgaggtccaggggaaagttatgcagctagcaaggagcacatttgattttggaggcagggagactcttaggaattaagtatcatgagttcaactcaagaatgctggctaggcctggcggcagttcacacctgtaatcccagcgctttgggaggctgaggtgggtggatcacctgaggtcaggggttcaagaccagcctggccaacatggtgaaaccctgtctctactaaaaatacaaaaattagctgggcatggaggtgcacacctgtaatcccagctactcgggaggctgaggcaggagaatcgctggaaccccgggggcagaggttgcagtgagccaagatcgcaccactgcactccagcctaggcgaaagagcaaaactgcgtctcaaaaaaaaaaaaaaaagtgtttccttgtctgaaagagaggtatctgcctgcaagccccacccagcctgcagtccctggttttgcacatctgtttctgcttgtgcctctcgttcctgacagccataccattagcaggccacctcctagctatcattcagacctcaaattagatgtcaccttttctaagaagacttctttgaccactacttcctcaaagtctgatgccatgacatgtagtatgttttgtactatctcataaaagcttgtctacttgcatacatggtttggcactcagataaatgtttggcgagtgaaggaaaaagtcaggcatcagatgctgtgtgctggagtccatttattcaggccctcaattgagaacagcaaggaaagtgccctagagtggggaaccagtcagcccaccttccccagcaacccacccccccccgaccctccccctccccc

SEQ ID NO: 482870 - DNA, 1000 bp, Homo Sapiens; identical to SEQ ID NO: 120063

SEQ ID NO: 482871 - DNA, 1000 bp, Homo Sapiens
ctcttttttctaagagatggcatctccatcacccaggctggagtgcagaggcatgatcacagcttattgcagcctgaactctcagactgaagccatcttcccacctcagcctccctagtagctgggactacaagcacatgccaccacaccaggctcatttcttttcttttttatagaactgaggtctcactatgttacccaggcaggtcttgaactcctgagttcaagtgatcctcccaccttggcctcccaaggtatggggattacagttgtgagccaccatacccggcctcatgttcctttttatcatcatgtgatttatgagtgccagagtacttactacctctagcaaatagaattgggtaaaaaacaaatggtaattggaatcagaggatctactgcttgctgtcagcattgttgccatttaatgaatgacatagttatgtaattcgattcattttgtctattcatatattcataaaattgaaacagaattatagatttgcttttgggaaagagtatgtattttaagcatttcctggtggccctgagtctcatgtgagttcctgtttcaggctcaggaagaggccaaagaagcagaaatgagcagaaaggagttggggcttgatgaaggcgtggatagcctgaaggcagccattcaggtaaacttggcagtttgttgccacatctttaatgatctgattcctactgctaatattttctttggaatgttgtattttgttttcttcttttaagacataaccgcataccttctatttgtccttttaaagtgtacaatttggtggttttaagtgtatttacaaagttttacaattattaacaccaattgtaggacattttcaccattccaaaaaaactccatacccattagtagttattccacttttccagcccctggcaaccactaggtactttctgtctatggataatgttgtgaaagcttgtgttttaacttctcaaacagagcagacaaaaggat

SEQ ID NO: 482872 - DNA, 1000 bp, Homo Sapiens
atttgtcaaatatttattgatgttaaatccacattacaccagcacaacaatccaaagtagtatgattgattgatagtactttttttttataaatacaatataaaggtggcaaaataatgctagttaatcccaaacccagcaaatcagcaaaaaaaggtcacattcagaaaaatttgccaagtaagacataagtcataattctacaatagagataggtccatgagagactgtgtatggtatcttaaattccatattagcaatgcatataagtgcggtcaaagaaacttgaaccacactgcatagaacatctgccacccggtgctcaagcctattaatcacttaaaccttggttggttggtgttcttacaaagaagtagaaagctgtacatgtgaaacagtaatatgaaatatatggggtggtacacagatataaaattattttaaaaaatactacgtatgaattgagtaactgagctaagagaggccacttataaataatgaaagatacatgtgttttgcataaggaatacagtgttttcttttcatagcaaagtaccattaaagcctcatgttttatactactaggtcaaattattttttctcctttttaaaatttatcggttccgacttaaaaccatcaagtctggtcagaatcaactcagtctagctgatgcaaaatcatatgcattcaaaaagcagtctttaccgagatgcctttacaaaccttggaatccagcaccttcttaaggcaaagtttcatggcagcagggaagtgaactaataattttcatttaccacatcttggtgtctttgaaaaaatactttatggcacaaacctgtttttgtctctccttatgtctccacttccttcaagtagactagatgctacaggcaatttctcatttatgccaccatgcagtctcaatccattttcaacttgctctacatacctaaaatcttccactactacacaaacctcagacacactgcaatctccaca

SEQ ID NO: 482873 - DNA, 1000 bp, Homo Sapiens; identical to SEQ ID NO: 237858

SEQ ID NO: 482874 - DNA, 1000 bp, Homo Sapiens; identical to SEQ ID NO: 309309

SEQ ID NO: 482875 - DNA, 1000 bp, Homo Sapiens
cactttaccacttttaatgtcaaggcaccacagattaaatatccttttatttgactcaaactgaacaataacatttaaaacacacaatgggaagcagcgcagttatctctcaaaatagacaatgatggtttaattaagaggttgataaagcatatgtagaaaagtcagaatgtcaaaataagtaccaaggagaacatatactttgaaaagggggctaaaacatgtagctatacaatctggggttcttatcgattgatggatagattgattgagacagagtcttgctctgttgcccaggctggagtgcaatggcgtgatatcagctcaccgtgacctccaactcccaggttcaagcaattctcctgcctcagcctcctgagtagttgggattacaggcgcccaccaccatgcctggctaatttttgtatttttagtagagtcggggtttcgccatgttggccctgctggtctcgaactcctgacctcaggtgatccgcctgctttggcctcccaaagtgctaggatcacaggcgtgagccaccgtgcccggtgctgggattctaattcaacaatttttcttggtagtcttgccaacagtaattggagaaacgtgttcctaattgtcggtggggagaggattaaaggtaagcacacacattttaatacacattcaatgtctgaatttgaagaataaaaatgcattgctttcaccacttaaaaagagctaaaatcagatccagttatttgacacagcaaagacatacaaatgtacatggcaacagcaagttatataagctggttctttagatcaaactaaaattctagtattttctgaccaaactaagttcaaaagtactaaaagaaaatgaaacaggcaaatgatgaaatgtggatctttttcattcaagaatatggaaactcattggactgaaaaacccaaatcttcattataccaaacttctataatgatcttaatggtagttagctttaaaaaaacaca

SEQ ID NO: 482876 - DNA, 1000 bp, Homo Sapiens; identical to SEQ ID NO: 309310

SEQ ID NO: 482877 - DNA, 1000 bp, Homo Sapiens; identical to SEQ ID NO: 309311

SEQ ID NO: 482878 - DNA, 600 bp, Homo Sapiens
gacacgtcccgcggacattcaggagtcccttcagtccctgcgagcgcggacccgggagagagctctcattcaacgctgaggccactggctcacagatcttccccgggtcaccctgcgaagtgcttggtcccccccattcccagccctgcagcagcaacaaacgggaaggaagtgggtgacgaggacaggcagagacccctcccacgggccgcccgcatctcacctgccgtcgcggggcagggcgttgcggcggtgcccagctgcagatccgcagcgatcgcactcctggcggccccagctttaagcagcagcgccgatgccctgctcgagggctcagggtctgacccaggtgagccccggggagcgggcgcctcggcctgccccgccccggaaccctgcaccgcccagagcgccacgtcccggctgtagtgccgcatctgtaaaatgggccgatgaacccaagggtcggctcagacccacggactgcagctccagctgggctagaaggggtggccaggggagccgatttcatccttttccttcctccacgccaaccaggagcctccatctgcctgggacctttggggcacccatgggccc

SEQ ID NO: 482879 - DNA, 1000 bp, Homo Sapiens
acatgagccatccctgggactgggcatgtaaaggaaaccaccttgaggttccccgtctgggagtggaggtgcacgtacacaaagaatcacagagtgaacattaggtggaaggacagtttaatgtgatctttcagtcctgggcctgcagtgacagcatggagctcttgcagctctccaggtcgggtgagacccagcctccaggaaccaggaagctgatgaatgtgagagccccacggcctgctcctgttggaggaaagcacccacaagtctgctaggctggcaaagaacagttgtccggcatcttctccagccttttcctctttggttgctggtgtctgagctcctggttttttccacctcgtccaggcctcgcctgacctcatggccccagacccctctcggtctttccacccaccctctccagacctcgtttggccctggtccagatggcctgacaccccagctgttcctcgtcagtcacaattgctgggatctattgaccactagcctttatacccacctcactgtcaagttcccaaggccctgtggtgcacccttcaaccttccgcagcccctctcagctgctcaggccaaatgtcttagtgtgagcctccatttccctcagacactcatgtgtacatcgagcccgctgactccccaccctccctaagtccagcctcaaacctgtcctccataaccgctcctccacacagcagcccagacagtcttccagaacaatcaggtcttgttgctgccgctgctcagcatcctccaacaggcttcactcacccccaaggcctgagtgctctgaccactgcctgccttgctggtcctgctcctaccctcatctgctctccctgcaccccaccaaggctcctgcctcatcccagacatgagctgatcacagcccagagagacacaattctgcatgctgaaatcccgaaaaatcaaaattctgaaaatatatttctggaaaaaataattttaaaattatttaaaa

SEQ ID NO: 482880 - DNA, 141 bp, Homo Sapiens
  misc_feature (6)..(6): n is a, c, g, or t
  misc_feature (8)..(8): n is a, c, g, or t
  misc_feature (10)..(10): n is a, c, g, or t
  misc_feature (34)..(34): n is a, c, g, or t
  misc_feature (50)..(50): n is a, c, g, or t
  misc_feature (52)..(52): n is a, c, g, or t
  misc_feature (55)..(55): n is a, c, g, or t
  misc_feature (59)..(59): n is a, c, g, or t
  misc_feature (71)..(71): n is a, c, g, or t
  misc_feature (83)..(83): n is a, c, g, or t
  misc_feature (100)..(100): n is a, c, g, or t
  misc_feature (105)..(105): n is a, c, g, or t
cccgtntntntgaaaaaaatgagattacctactncatggagttgtatcanantancatnatgattagagangcttggaatatngtaagtcctcagctatntttgntattatatttattattattattctcactgctttgtc

SEQ ID NO: 482881 - DNA, 242 bp, Homo Sapiens
  misc_feature (222)..(222): n is a, c, g, or t
gatcaatatggtagccgacttaaagaagataatgttaaaaatccagtttctcccttgagctagcctcgtttcttatgctcagtcaacagccacatgtaacccacgactatcacattcagtgacacagatggagtacatttcctttatcacagaatgttcaattaaactaagctgctgtagacaaaagagcatgaacaacactcaggtataagacactgtatngaatatctagaaaagagtaa

SEQ ID NO: 482882 - DNA, 737 bp, Homo Sapiens
  misc_feature (611)..(611): n is a, c, g, or t
gatctccagttcaaacaaaggaaataactatcaccttgaaagacaaaaagaaataattggctgaaaataattaaaaacaaatgaagtgtttgtctttacagtgagatatggggataaaaagagtagcagcttcttcaaaatatctttattaacatttgagaaaatataaaactattctctaggcaacagcatgaaaacacatgaaataagtgggtacatttaagccactgtgactgaagaagacatttccccgtacatataattaatataaacaggtaaattcagaccaataaaacacttctttctcaaaagcattttagtgccctgtgttactctggagactcagtagttgaacaaatatgtgctcaaaaataactattcattctttaacagtacttaaaaaaattaatatgaacataaaaacacaaattactccattatttccataaggtaaaatattaggttaaaactacaatggccaaactgtttagcaaacctctgtcctattttaaagggaaataaataaataagagataggtctatggaaaataatgaagttgtctagcaacacttttcacatcacttccaccatttcaacagaaccaacagcnaatctaagggtccccaagccgtttcccacttattagggaaatcgatagcattacctgcggggtgcctgcggttgcttctgcataaggcttttatctcattttagcaacatttaaaaaatgcaggat

SEQ ID NO: 482883 - DNA, 173 bp, Homo Sapiens; identical to SEQ ID NO: 309312
  misc_feature (13)..(13): n is a, c, g, or t
  misc_feature (28)..(28): n is a, c, g, or t
  misc_feature (129)..(129): n is a, c, g, or t

SEQ ID NO: 482884 - DNA, 1000 bp, Homo Sapiens; identical to SEQ ID NO: 309313

SEQ ID NO: 482885 - DNA, 1000 bp, Homo Sapiens; identical to SEQ ID NO: 309314

SEQ ID NO: 482886 - DNA, 754 bp, Homo Sapiens
cggaacacaaacatctgatgatcacattctgccactcagaagtgtgggagaggagagggccctgtgggagaaccagcgccgcaggccactgctgacttgccctgagcctgccaggtctgatcaagggcaggacttgggagacagcatagtgcctcctgctcttgctggagtctggggcagcaacctcctggaagcttgagggacaagtggctggccgaggcctccgtctcctccactgtctcctgagggttgcagcacgtgggccctgtgtgccgcctggggtggccagcctcccacttacctgttggagctgagcttccacgccacctcctgcacccggatggcaggggacaaggggggccgtggccctccacagtgctgactgtgctggggtagccggggcgagggaggcgacccagggcggtgttgttggcgttgttgatgttggcgttggagccggtggacgagtagctgctcggggtgaaggtggagtccaccagcttctcgtgggatggcgactcagtgtcgccctggctgctgcccgccttgttgatgtgcagcgggcgctgagtggtgaaggtctgggggaaggcgctccggccgtcgctttggtagtagctgacgtggttgccgaacaggccaccgcctctgtaggcaagaaggaggggtgggtggagaagccccttagcacccactcctcccagagaagcagcctccacagccaggtcagggaagtgcagggcctgggaagcgg

SEQ ID NO: 482887 - DNA, 1000 bp, Homo Sapiens
gcgcagagggcagtagcaatgaggatgacagcgagggctgccgcggagaccttcatggtacctgtgggagaggctgtgcgaggtccacgtgctgtcttgatcctctgcaggaatcctctgcagctcaggctggccctttatagggccagttcaggggcatcccctaaggggagtttccaaaatagcaaccaagcattggccggtatcataagtgaaattgcacaaaacggaaaagaaaactgaaatagcctccggaaattcgagtctctgtctctccctcactgctctctcatctagagtgagctcatcagtttcctctttgaccaagcaccaatggtggaaaaatttctctgctgacatccttagttttaccttccagggaaggggtcctcctcagagagcaggaagccgctttcttggggacaacaaggagtggcagttaggacaggatcagaagtcactgagtctttattactcactgagtcactgagtcttcaaagttcctgcttattcattacagatcttatctcctttccctcatccatggaaggatgttatttataaagtgttttattgaggagggtcctctggatatacagtccccaaaggaggtgagcacactcacactgtaaattgaggcagttgatctgagctgggcattgggaaccttttcacaagatatgagttggaatgagtcctcttgtgggaatttcttgctttcatcctggtcatagggtctctcccatttacttgctaagcgacctttgggaaaagtgcttaatgtctttgagttctatttccttgtttataaagtggaataattgattagagacttgttgagaagcagagggagagaaagatatcttacagcatactctatcattattggctaccatttaccgagggcttatctgtgccagccactattccactgtcttagcgcgtgtcaactcatttactattattatccccattttatgaatgaggaaactcaataaat

SEQ ID NO: 482888 - DNA, 1000 bp, Homo Sapiens
tctagagtcccggaggcagaagggaccttggtgaccacatgatgtggccctcattctgcaggaggagaaatctgagaccctggggaggtgacgatgcccaggtagcattaaatccagacttcgggtgtctgtcaatgtacattttatattaaaaaagccaaaataacaatggggtgagaacaggaggccactataccagtggccaagagttcagatccttggaggccgtctttggagaggctcaatgggactcgtattctggcagcagcacagcaccgtgtgggacacaggacaccctccccacacctgagctttcacccacaggcaagggatgtggcgagaactgacgggcacacgtgaaaacagtcagccctgcccggcgttctttgaaggagagctctaaggaacacaagcacacagggctgagttcagcttttacccagcttttttaacttacctaatttttaaaaaattgaaaatggctgggttaaaagactagggccagctaggccagcccccgaatgccactcggacagcccgtgaatgcctgtaaagcactctcaggccctgtgtttcacacgactcaggtagggactgtgactgccttctgagagaaggaaacagggatttctagcgaatgaacgcaacgtgtcttatgttctctctctgtggctacaataactgtcaacaatcacccaggaggacagtgtggcaagatttaattgcaacggcatctgaaaatggtgtgtggcgtcgcgcgcgccagctatcgtcagtgcctttattgccattgggtttgtgactgttgatatagtgacgacctcaggagcaacaggtgggttaaaaacccgtggctgggcagttcttccgaggagagggaccacatgaggagccaagaaggactcagaacctgacgaacgtggcatcgatctgccgcacggaggggagggcgagcatgaccttccgccggtactgggggtccttctgcaaggggttccgc

SEQ ID NO: 482889 - DNA, 1000 bp, Homo Sapiens; identical to SEQ ID NO: 120064

SEQ ID NO: 482890 - DNA, 1000 bp, Homo Sapiens
agcttctgtctgcaaggagttgcgaagtgccattctctcagcatgtggacgtgttcttgtccaccttcctggaagcccccacacatttggctatccacaagctctctgaaccctgtccttttgggtttttaggagccctcattacataggcatgattgattaaatcattggccactggcgatcaacgtcactttcagtccctctcccccaacctctgggagtttggggggtgggctgaaagtttcaacccctctaatcatgccctggtctttcagatgtccagtccctatcctgaagctacataggagctgtccgccatcagtcatcttactagcatacaaaaagacatcactttagagatcccaaggattttaggagttgtatatcagaaggcagagacaaagaccagatatatatttgataatattacagtagaaataaagacattttagatattcaagctcaggaggctactaaaggacaggctccatcaagaagagaaaaccaagcaagaggaaaatatgattcagaatccaggaaatgtccaagttatggcaagaagacagggggttctcaggaacatctcgaagagaaagtggagcatattacctgatgcacatgactttgttgggaagagctttacacttagggcagcgacttttgggtaaagtagtgacaagagcatagaaaaccaagcaaatgagaaaaacaatgtaattaactccaggaaaaatcaaaagttgtacctaaaggaaatgtaatcataaaccaataaagggctcaacaggaaatggtaaacatacagttatactaaactgtgaatgcaggtttcagccaatatcaaactgcttagggagactaataggagaggaaatgtgggtgtcgagggtgggggtgataatatgttgtgggaaagacagtgtaagagaagctaactcctcttccattgtaggaagtcaacaatgtcaagtcaagattaagaaatagcattatttaagtc

SEQ ID NO: 482891 - DNA, 1000 bp, Homo Sapiens; identical to SEQ ID NO: 309316

SEQ ID NO: 482892 - DNA, 1000 bp, Homo Sapiens
ctgttgtctgctgtgcagtatgttgaggtctccccgtctccgatcactgacctctgccccctgccccttcccctcagcagcgggagggccagttcagcagcctgcagctggtggccatgcagcggggagtggctgctgccatgcagtacctgtccagctttgccttcgtccatcgctcgctgtctgcccacagcgtgctggtgaatagccacttggtgtgcaaggtggcccgtcttggccacagtcctcaggtgagagcacagccttggggacacagcctggggccttgtggcatgccccagcaggtgctggggtcgggggtgagctggaatctggggtaggtacctcagccggggtgtcatagtccctgaaaggagggaggctctcctgtgtgatggggagatgaaagcctaggcgacggggtttgagggatttcagggaccgagacaaaggggatgagggaggggaggagacctgcaacaatctagaactacctcctgcccttcccccattgtggagattacacagactccagagtcagcacagctgggtacaaattcttaacactctgctctccagctctgtgaccttggacaagttcactttctctaagcttcaccttctgcttctgtgaaatggagataatatcatccaccttggagggttgttatgaggattaaatgagatgcttgatgtaaaacccttaacatatctgagcacatagtagttgctccataaacgtgactattgcttctgcttctgtgaaatggagatgatatcatccaccttagagggttgttatgaggattaaatgagatgcttgatgtaaaacccttggcatatctgagcacatagtagttgctcaataaacgtgactattactatgattattactatttgcttttgactttacccctcagggcccaagttgtttgcttcgctgggcagccccagaggtcattgcacatggaaagcatacaacatccagtgatgtctggag

SEQ ID NO: 482893 - DNA, 1000 bp, Homo Sapiens; identical to SEQ ID NO: 120065

SEQ ID NO: 482894 - DNA, 1000 bp, Homo Sapiens; identical to SEQ ID NO: 309318

SEQ ID NO: 482895 - DNA, 1000 bp, Homo Sapiens
gaggctgtggctgcagccctttccctctacgttgtccccatagaggctagacattttaaggtcagtggagcactaccaaatcaaaagagcctcttaaattgtcttctactaaaaaattttaatagtagcatattaatatttttaaatgttttagtatcatctcatttcaaaaactatatctattgttcttatatataagaaaaacaatgattttattttaagttgtttattttaagataatttacaaatatcttgctgtcttcagtaattcaaataatggaggaacagtttcttcggacaaaggcagcagtaagctaaaaacaaaatcaactggctgaattttccttctttacctgaaaaacaaagtacagaacaagtaagaaatcaaacagcattttttgggaaaataatgtcaagagataataatacatatttaagtggggtacagagaactgaatttacacaataaagtgttaccctataccagtgattctaaaattttggtctggggaacctttcatggggttcatgaggtcaaaactattttcatgataatgttattttgcctgttatattctcattctcgagtatacagtagagttttccagaggccacatgatccatgacatcacaacaaaatgaatagagacagatgaaaatctagctggcttctgctacatgaatcagacattaaggggtccagagaccataaagtgtgacaaccaccactcttcacaacctatatataatatctcaaaataatgttaattctctatcctcaaagtttatttccttatatctacattttctatgatcaacacactcactacaaaaaagtccactagcgttgcccaggtgctcccgtgagttggctgctactgtgaagtggcccatccatctaaatctctcagaggacaattataggattactaaattagcttaacttatatctgaataggtttcttttctgaacagacatgggaagaatgtgtgaacttta

SEQ ID NO: 482896 - DNA, 423 bp, Homo Sapiens
ttagaccagatattctgaaacacaaacaagcacaggcaacatacagtcagaatcatcacagtaagaatcagcaagtaccacaaattattaaaagaattttaagtgaccttacttaactagattcagcccagtccaacttcaggctttttaatcaaactgtaattaatctccacgcaatacctgaaggagaaccaccaacatccgctggtagtaccctgaagtgtcccccaccacgtcatcttccaggcttgagccatattctgcaacaaaataatttcatacttatttacatcttctttcaactagaaaagtaatcttgccccattaatcaaatgaaagcgatgtaaaagaagaaataattatatctggttaacataaattccctctattccatctctgaatgctctaagcaaatgctttcag

SEQ ID NO: 482897 - DNA, 1000 bp, Homo Sapiens
ctgtgggtagctgtcagtccttggcaaaactgatatatcataggtggcagcaaaatggcttttcgcttgttgtatttggccataacgttccctttttctccatttggcccttcgattttgaaaccaaacctaattatttaataaaaattagaattttagctaaggaatatttgataaagcaaatgtgatgttaaaagacatcaaacaagaaaggtaaaccaggttaaaaaaattacgtaaaaagaaatgtatttatgttagaaaaggatccacagattttactttttcttgtatcttgatgtggtaagtgattttcccatgagacaaaataatttaatagaaagaggcaggagactttcgggaaatacatctgatacgtctgagcctctgttttctcatttatggaaaacaaaaagcaattagattatatgatcctgaatactccatatatctccacattgtcatggataagtctcctttaagagaatgctgcaagtctggaagatgtatatgccgtaacgtaaactcagtcaatctataagcaaattaatatctgagtctattaaaacttatctttaaaatatatcacaaaagtgaaagctcttctcagttgtgctcatacctacataatcttttaaaattttaaacataaagattacacctaaatatatggcagcagcaggaacatcatgattatctagaaataggaaaaaatgagattacatattataataagcatgacaagaattataggtaaaaaggaatcatctaaagttgaactatggttttaaaatacgtgaatgtgcttattacatacattatgcaacttattttcccttatgaaaatgctcggatatctttacgtaatttctctaatttaaagcacaggtaatggaaataatataagaaatagggcagatagaaccaagtgtcaagaaagtctatcagttactgtggcagctaaggtcactaagctatcttccacaatttctctaattac

SEQ ID NO: 482898 - DNA, 1000 bp, Homo Sapiens; identical to SEQ ID NO: 309321

SEQ ID NO: 482899 - DNA, 1000 bp, Homo Sapiens
aataaatgaatattcatttattaagcttttggatatgtagatggatctttttcatcaaatttggggaatttacacccattatttcttcaaatagtatttttgtccccttattttctctctttctgtgattcccattgtacctgttagatacccttgatgatgtcccaaaggtctctgaggctccattcatttttcaacactttagctggtgttcacattgcagttctggaggaacagattttcagagcttcttatcctgccattctagaagtgcttctcttgtctatctttacggccatagaagtgcagcagtgggctcatgttcgtggaattcactggtcttaccacgttgcccatcatcctgaagcagctggattgatagaacggtggaatggcctttcaaagtcacaattgctgtgggtggcaagccacccaggtgccaaggcaagagaccgaggacacgagcaaatgccctgaaaacaatgtcaagtattgcctcattacatctgcctctgctgcaagttgtgatgtcataatagaatcatccagaaatcctttcattgtttttcttatggaagacttgtggacccaaggtggcatttaatcataactctcttgtctaacttggaaacaagaatttactctccttctcttctttttgttctttctttctgtaatcctagctactctggaggctgaggcataagaattgcttgaacctgggagacagaggttgccgtgagccgagatcacaccactgtacttcagcctgcggcttctgtgtccaccttcaccacacttccgtcctcctcatcttggagcacagcctcggcctccatgatttcctcgtacagtcctgctagcggcatttccccaatgacatcatagatggcttctccaggagatacctcggatcttcccagacccctctgcatggcttgtgtgactcgaggcagaatcagaaaagccatgaggcccagaaggagaagaccaagaaggg

SEQ ID NO: 482900 - DNA, 1000 bp, Homo Sapiens
ctttttaaaattttatttatttatttacttatttatttggagacagggtctcactctgtcacccaggctggagtgcagtggcacaatcatagctcactgcagccttgacctcccagactcaagcgatcctcccatcttagccttccaagcagctgggattacaggtgtatgccaccatgcctgggtaagtttaaaattatttgtagagatagggtctcactgtgttgcccaggctggtctccaactcctgggctcaagtgatcctcccgcctcagcctcccaaagtgctgggattacaggtgtgagccactgcactcagtcgggaagcccttctaattcaaatatttgaaagcaagtaagcagaaagtacactacatatacccaaaggtactggtagctgctttgctgtgtctcgaagtggacttatatatgaaagaaagttacagcagacttccccaagtctgatcagaaagctgtggttgccatcttgttcctgctctcttcagaaaaaaaccatggtgctttattaagcccatgaaaagcacacaaggaggtttgagatactggaagctcagattctccatggaggcaaggtgaccattcgcacacgtagaggggagatctgatgatgtggtgacaggtgtgtacatgcgcaccttctatgtggtgccctccagaagccagctgatgtgtcccgacactgcccggtgaaggttggacccgggaggggaaaagctgatgtattctctgcaaggccagaaacttgatcagcttctcgtccagcatatttatctcgatttctccattgacatccataaatgctcgaagtgagttggtgaggtccaccatggcagtagagttggctgggaaagagggtacggttaaagcgcttcctatggataacgtgccggggctgaccttgccatctgacgatggcgctggtgagctgaatcgttggttggctgttgtggccaagataccatctcctgctgcttgcggg

SEQ ID NO: 482901 - DNA, 1000 bp, Homo Sapiens
gagatgatgtgtctctctgtcaccaggttggagtgcactggtgtgatattggctcagtgcaccctccacctcccaggctcaaccgattttctggcctcagcctcccgagcagccgggaccacaggcacccgccaccatgcccgactaatttttgtatttttagtagagacaggaattcacaacattgtccagggtggtcttgaactcctgaccttgtgatccgcccacctcagcctcccaaagtggtgggattacaggcctcagccaccacacctggccaagattcttcatatagctgattatcttgccatttctaacttacaatcttttatccacatttcttaactttcttttgttacactaaacgggacaggaagtcttaactcttgtatccaccaagcatgttaggaaaataacagagattccattagcaaattaagctccccaaaaaacacagatacatatctaaaaaatgttgcaaagacaagaagtggccagggcgtgttggctcacgcctataatcccagcactttgggaggctaaggcgggcggatcacgaggtctggagatcgagaccatcctggcaaatacagtaaaaccccgtctctactaaagaaaagaatacaggccaggtgcagtggctcacgcctgtaattccagcactttgggaggccgaggtgggtggatcacgaggtcaggagtttgagaccagcctgaccaacatggtgaaacctggtctctgctaaaaatacaaaaattagctgggtgtggtggcacgcacctgtaatcccagctaaagaggtggctgaggcaaggagaagtgcttgaatccaggaggtagaagttgcagtgagctgagattgcgacacggcactccaacctgggcaagagagcaagactctgtctcaagaaacaaaacaaaaaaattaagctgacgtggtgggcgcttgtggtcccagctactcaggaggctgaggcaagagaatggcgtgaacccggg

SEQ ID NO: 482902 - DNA, 1000 bp, Homo Sapiens
acgaaacaaggctgccttttaattgctatcagatattcggatatcccgtctgatgtcagcaaggcccccgcgccccgccggaacccgcagggatggagcagcaccgccgcctgactgcacagaagggctggggcagggtcgctgtgcctctcggcctccttgctgccaccgtctcttagcctcggggcgcctggtgcaccgtctcctcttcgggtcagcccagcctctggcggccctcggaaggaggggaggcaggggtcgggggggtgagccggaggcgggggccccgtcgcgcacgcatgcagacttgccctgtgttggcttcgtttgttctcctcctttgctaaagtgatcagatagtcctgtgaagcagctgccagccaggtggacagggcagcggtgctgggatgccgcccgtgggctcctcggacatcctgaggccccgccctacttctgtatctggaacaggaagagccgcaggttgatgttcttggcagccagcagcttgttgcactccacggagtcaatgatgggcagtggcacgtagtccgtctcgttgctctcgttggtgaagacaaagtggtagatgacggggctgatcctcacgtcgtcgtaggggcccttgagcagcaggaaggagcactccagcggtgccgtgaccttgctcttgaggaggagctggaaggagagcgtacgcttgcaggacaggttggggttacgctccgagtcgttgactcgagccttcaggacccacgtctggttcagcactgtgaacctgggcgtctcatagtacaggcgcgtgatgaagtcgtctgtgcggtacggccggaactggacctctgtgtagccaatcttctcgaagctgagcaggctgaagatgctgttgtacagctgcatctccttgcggtggctctggtccatcccatccaggatctccatcagctcactgcctgtcttggtcgggtgggcgcacgcagcctcgtgcaccgtcagctcatgg

SEQ ID NO: 482903 - DNA, 1000 bp, Homo Sapiens
gcggccgcagctgccgcctctgccagcccccagctgcccagacccgcgcctgccccctcggggccctctccgccgccggcccctgagcccccgcacaccgagcagggccccacattgcagcagacggagcagggcgcactcaaggcgggcaggccagggccgggctgcaggggagaggggagaaccccacggtgctggcgcttgaggtggcggcccaggctggagcgtgaggagaagcggagctcgcagaccaggcagcagtagggtttctcaccagtgtggacgacctggtggtgcagcaggccggtggagtcgcggaaccccttggggcaggcagagcagcggtagggccgctccccggtgtgcgagcgcaggtggttggctaggttgaagctgtgcttgaaacccttgccgcagcgcggacatgcgtggggcttgagcgctgtgtgccgggcaaagtggcgccgcaggtctgagcggtagcggaagctcttgccacattcactgcagtgaaacgggaccctgggggcggcagcggcgggcggtgctggtgcaggggttggggcggggacgtcatccatggtggcggggaatacagtggtatgtgggggctctctctggagtagtggggagacagaggagcaggtgagggggtcggctccccatcagctctctcctcccaggttcccagactcaccacctgtcccctgggagaccctcccactgcccacctctctaagccactctcattgttctttaaaatcctcctactcttagaaacccttctctcgcggctccacgcctgtggcaaaatcttcctaatcacttcatagtctcctcactccatggagtgtttttaagcctctcctcgctcttcgccaatgcgcggccactgctctctgtgcccctcccactgtaatttaagcctctcccactcttccttaagtcccacctactcccttcaaagtcccccacaatgttccctaaggatcttgtattc

SEQ ID NO: 482904 - DNA, 1000 bp, Homo Sapiens; identical to SEQ ID NO: 120066

SEQ ID NO: 482905 - DNA, 1000 bp, Homo Sapiens; identical to SEQ ID NO: 309324

SEQ ID NO: 482906 - DNA, 1000 bp, Homo Sapiens
tggaatgcttttaagttgaccatttcttctacactggcctcccatacacgcaggctattttttgacttactcttctattaggtgggtacaaaagtaattgcggtttttaccattacttttaatggtaaaaaccgcaattacttttgcaccaacttaataaatagtacttacctctttttaaatttagctgacacggtccaaaaagtggaaaagtcacagttaattatttttagtcaggctattgatcaggggcttaaatcaaatacccaaactgaattcagacttcactaatttgctgaagcttgaaatgtggaaaaaagccccaaacttcaaggtttgtgaaacctggatcatcattttgactgactaccagtgtgtactaactggaactattttcagtaaaattattttacggaaattagtaaaaaaagattcagcatgttttacaagaagacagcatgaagatatagggctgtgaagttctgcaactctgtggacatattttcaattaattttcacatacgcagatattgaaaactatatgtatataagaacataaactctttataaaacaattctcaattcaaaaattattggttaaagaaatactgttcttctacaattatagcccagtgataattataacctaggattctactggactttatttcataaggcaattctttgacgactctacccactctcttttttttcttttctttttttcttttgtagagataagcatccattatgtctcactttatcagactttgtgaaacaaagcaaacagcaaaaaagaagctgggagatggaaattcagaggtgcaagaaatttctcattcatatcttggcatttatttctccctgaggcaaaaatggatggaaccatttcagaagctgagttttccagttatgctgaaactgagaggaaaaagctcccctcaactgccagacacatggaaggcactagaaggtgccccaacatgactagaaagatctg

SEQ ID NO: 482907 - DNA, 1000 bp, Homo Sapiens; identical to SEQ ID NO: 309326

SEQ ID NO: 482908 - DNA, 1000 bp, Homo Sapiens; identical to SEQ ID NO: 309327

SEQ ID NO: 482909 - DNA, 1000 bp, Homo Sapiens; identical to SEQ ID NO: 309328

SEQ ID NO: 482910 - DNA, 1000 bp, Homo Sapiens; identical to SEQ ID NO: 309330

SEQ ID NO: 482911 - DNA, 1000 bp, Homo Sapiens; identical to SEQ ID NO: 309331

SEQ ID NO: 482912 - DNA, 589 bp, Homo Sapiens
cacacacacacacacacacacacacacacacaccctcatgcattgtctcatggcagttaggaatcataatcagatgacctgccttccagacccctccaaaccagtttctttacactactcttcaaaaccaagcaagttcatttatctttgctaaggatttagttcagtcagggcttcatttctattttggattttaataattatcttgagtttgtagcagcagtatgataaggagtgaatttgaaatctaggctatgaatgtttattgtatttcttacagttaactcctttaatctctctgcttcactatttttataaaaaaaggccaataactccagagtgcttttgaggattctggtacataaaataatacaaaggtctatatgaaaatgttaagttagtaacttaatacttctaatttgccaggaatttttaaatgtcattatatttgaataagcaaataaaaagacctttagaattgtaacccacagccatccttagacatggagacctttgctaggattcctccccattctccaaaaattgttcttaggtggtgaggcctccctgaattgagaactcaactcat

SEQ ID NO: 482913 - DNA, 640 bp, Homo Sapiens
agcccactgagcttgtgatctatggatggggcttcyggaaagttcctaggcctcactcactgagggcggccattttgtgatcaatagtcagcttcctctcagttctgagaggatttggggtatctgtgtgtctgtgtgtgtggacgtgtgtagacatgttgcgagtgtgtatgcaggtgtggatgtaatagtatgtgacacatttttttccgtcttttttttttttttttaaacaaatgaaagctgccttccctgcagccctcaggtcacctccagggaggcaggagacacgcggtcacactcagctcgggacctcaggctatgccactgctccacggctgtgcggtgcgtgttgagcatgcgcctccagtggttggtctcagaggggcctgaagagtactggccaatgacgatcctcccgatgaagtcattgctgctcttcatgttgtggccgaaaactagggagccagagggttgagggcaggagggaggcaagaggaaggaggggaacagaacaggaaggcagggagaagacaagaggccattagtctacacatttgtcaactgcaaacatgggggtcatcgtttagggcacgctgtctttttccttttcttggtgagaagtccaactccctcatct

SEQ ID NO: 482914 - DNA, 1000 bp, Homo Sapiens
tttcttcaaaaaatgaggataactgtgcctaacctaaaaccgttgactccctcatgctggcgccgttatatgggattgttctcaaagcgtacaatgctgtttagtttagggctttggttaacagccctatttaagtaccccaaagatggggacttgaatagtctgaagtaggcaccccgaaactaaagttccttcgaaacactctcgtttaattaaaaaaaaaagtcacggtgatttgcatgccactccaattaaaaagaaatgcttttatataaaaactcgttttaaaattattcaccacttagcttttccaccccttcaattttcaagtaaaaaagacgctccaggaagatggcaccgttataattatcagcactttcgacaagggaagtgcagctcaaacgttatacctcaatgctggtctcctacatctccctcttaggcacaatcacacacaatcccgcacccagtttcacattcactcaacaatcccaaacatcaggtcaaactttgaggacaaactcggtcacactcgctcaaacccgcctcagaggcccccatctccgccccgcacgtaggccagaagctcttacacccactccctgccctcgcgccgcgcccctaaagatcaggaatcctcccctttaacctccccggtccgaccgacccgagacgcccagatcccacctcctactttcgcgccacgtggacccaggggccgtactgacccgcggacaaagaccaaaatgtccactcggtgcgctgcgcttgcgcactcggagagcgaggaagcactcccagaagtctccgcgacgcggcccgcctcggtcaccgcggccaggcccaggctggtactgaattaccttctattaccagcaacgtcgcttctcaggccttggactacatttcccttgaggctttactggtcgactctctgtctcctcccctccccccgcgaacttggccgcctccttctgtgacgatggagctcttgaggtaa

SEQ ID NO: 482915 - DNA, 1000 bp, Homo Sapiens
aagcttaaaaaggagtaggcgggaggcgggggcacgatggttccccagaccaccccagcccaggggggttgtgttctggggattcaggaggtcgaggcacccagtccgtggtgagcagggccaggtctccttccttcccaagagcacggtgcgagtgccttccccacagctctcccaggtgtctgtctccctcactcccccagggccaggacagcgagcagggagcacgccttcctcctggtccctcccagaccctcgccaggctcagcagacccctctcctgttgcgttgctccttcggcaggaggtcagcgtgggtgagaagggagcagaggccagatgacccttcatgtcagttcaaggagaggcccccaggtcctcctcacgggttccactcccctcaccctcccagtatccatgagcatcccaccgccaccaagtgcagggcatccagggggtggagagtggatgggcttgaaggggagtgggtatgaggtttggacaaccccagatgtgaagagtgtgtgtgtgtgttgtgcacgtggattgcctgtatggtattgcaggggagaagaggatttggaaaaggtgcaaggaaattgcaagaatagaaaatgaaagaggaagtagaaaggtttgcggtataagaagggtgagagaaaggggagtggggttatggagggatctagaagagaatagtggggagggaaagggcaggaatggaaggcaagcccatcaccccaaggccccttccccatgtctacccctcccccaactccaaagaaggaaattaggaggccactgcggattatgtttgggtcatttccacatgctttattccagcaatcaaaataattaaaaacatctcaaattattatacacatacaaaataggtacagagtcttttgcttcctcccacccctagggaaaaactgctttgtgctttgggaagttgtctctgaaacccggggacagaggacgcaggacagactaggagggag

SEQ ID NO: 482916 - DNA, 1000 bp, Homo Sapiens; identical to SEQ ID NO: 309333

SEQ ID NO: 482917 - DNA, 595 bp, Homo Sapiens
ggcggggaggggagggtgtgtacgcaggtctagctcgagtccctcctgctgcagcctaggcacctcgcctccctcagggaccggctcctgggctccaggagagggaggccggccctgtaccggaggctgcctcccgcccgcccggcgcccgcctcacctcccgcaggggcccgttgagctcgcccaggatgctgtcctcgtcaaacatcttgccctggtaacggtgctcatagtagtcgtggatcttctggcggaagtcagctggcagcttgtggaaggacatgtactgctccacctgcttgtactgtggggaggaggcgaggctgggtcagacaccgcccccggcctgcagcgggcacaggggcacctgcttgtactgtggggaggcgaggctgggtcagacaccgcccccagcctgcagcgggcacacgggcacctgcttgtgggtcagacagccccccggcctgtggcggggagataggccttcacacctgcttgtactgtggggggtcagggctgggtcagacaaagcccccgcccacagcggggagacaggcctccgccacacacaggggcggccagattcaacaagagc

SEQ ID NO: 482918 - DNA, 1000 bp, Homo Sapiens
cctctgaaagctaagatgtccccagggtccactgggcatattataacctagctcacacgtcgggtgtctgatttactttagttttcccaggatcatcccagttgtaaaactgaaagcccaaagagagtttggtgaatgggtacaaatacacagttcaataggagtaagttccaatgtctgacagccgggttgggtgactgtagctaacaaaatggactgtctatttcaaaatagctggaactgagaacttgaaatgttctcaacacatagaaatgataatcaaggtgatgaagaccctaaatgccctgacttcatcattacacaatccacacacataataaagtatcacatgcaccccacaaatacctacaaatatgtgtatcaataaaaataatttttaaaaaaccgaaaggaccacatcccaggaaaactcctcaatgccaggccaatcaggattattgatcacctgaccaccttccaaaccaagcccaggcatgagaaggcctgggggccacttccatcctgcaatgtcccatgccttccctatcagcaagaagaaaagaaaagcccagcttggatggtagagcactgctctttagagagcactcagagcagaagcaactatcctgaagcagtcaatgccaaggagctcctgctggatgaggtctggcagtgcaagccaggaggggcttcagcctggaccatcagacaggcctggaaagcaaggctcattcaggccctctcccttgaattgagagatcctcttgcctgagcatcatacatgaggcacatggattcaggcctcagaccacgccagactccacattccatcatctctgctgcccaagcaggcaactggaggagagctgggggaggcttcacatccttcctaggattgtgactgtcatgatactcacctggggaataacacagacccacctattactgtccagctcgattgagagttcaatcctgatgaatggctcccctataagagctg

SEQ ID NO: 482919 - DNA, 1000 bp, Homo Sapiens; identical to SEQ ID NO: 309338

SEQ ID NO: 482920 - DNA, 1000 bp, Homo Sapiens; identical to SEQ ID NO: 309339

SEQ ID NO: 482921 - DNA, 1000 bp, Homo Sapiens; identical to SEQ ID NO: 309340

SEQ ID NO: 482922 - DNA, 1000 bp, Homo Sapiens
aggtgattttgaaaccatcgagaattgaaatctttaatttatttaagcaaagttaagattattcaaagaaaaatgtcaacataacaactagaattctagaatggatcataccgtgtttcaaaatatagaaatgaggccaggtgtggtggctcacatctgtaatcccagcactttgggaagacaaggcaagaggatcgcttgagaccaggagtttgagaccagcctgggcaacatagtgagaccttgtctctacaaaaaaatccaaaaattagcagggcatggtagtgcctccctgtagtcccagctactcaggaggctgaagtgagaggattgcttgagcccgggaggtcgaggctgcagtgagctatgatcatgccactgcactccagcctgggtgacggagtgagaccttgtctcaaaacaaaaacaaaaacgtagcaataaatgattgtgagcttatcaacctattctggaagacatatgttccaaacaatctctagatgagataacagctccaaagtcctccctttaacattataaaatgtcattaaaagctaaacaaatggcttagattttaggattgaggtcactaaaatcagtttggtcacctaaaatttgtatcttacctataaaactgaacagaataatatgctgactcatggtgctggcttctcttttataattataaaagcgggtaattttaaagaattatcaaatttacatttaaaaagaacatggctgggcacagtggctcacgactgtaatcccagcactttgggaggcaggggcaggcagatcacctgaggtcaggagttcaagaccagcttggccaacatggtaaaactctgtctctacaaaaatacaaaaaattagccaggcacgatggcaggtgcctgtaaccccagctactcgggaggctgaggcagatgaatcgcttgaacctgggaggcggaggttgcagtgagcagagattgcgccattgcactccagcctggactac

SEQ ID NO: 482923 - DNA, 1000 bp, Homo Sapiens; identical to SEQ ID NO: 309341

SEQ ID NO: 482924 - DNA, 1000 bp, Homo Sapiens
gtctggattacaaacgtcaccacctcccccgcgtacggctcacgcccaggccgaggcatgcggggcacggcatttacagggtcctctgcgtatctcacagggtagagaggtggcactcgagaccctgggcaaatcaaaaggaacacacggaagctggtcacgagggggttacctgttaccacgagatccagcgcatggggtcccgagactacatggtgggcttgctgatgttcacgtagtggcctggacaggttcactgtgccctcagaaagcccttaccttccagtactcccagcttccgaggagagcgggacccatttgacacctcaggtgcctctgtggggcctcaggctccctggtaacacagctgctccagaggctgctcctggaagcctcctaaaggcagctctcctgcaggtatcagtagctgagtaggaagcatcacaactcacagggaaatccagggcaggtcaagagtgcctccccccggatacccatcagtcctgcctccaacacagaggctaactcagccacgtctcctgcctccagtgccctgcacctcagcactgtcctgggttcctcctccagatgcccctagctgtaagccctccagttccctcggaggccctgctcaactcctgccagccccaccctgcccaccgcagctcatgcagaagctgcacagggctctgccccctggagaggctttggagtcccacccagctgcctgtcgtcttccccccagcaccaccatatggtgctgtcagcggcttctgcacactcttaggaaccaggtgccatgaggatagggctgctctgttctccaggtggaaggaatgtgtgttttacccacaacacccaccttgacaaccggaaggactctagagctgatggctctagaacatgcactcaaggggctgcacaggctgggacatgcagttctgtcacttactggcctagaagaattcttgtacctttcctcataaattccaaacgtcgg

SEQ ID NO: 482925 - DNA, 1000 bp, Homo Sapiens; identical to SEQ ID NO: 309342

SEQ ID NO: 482926 - DNA, 1000 bp, Homo Sapiens
tgcaaacactcaaaggtaggacccagccagaatggtgaagggagaggagtaggtggggacctagcactgttctctaggaaagctaaggtccatggtccatggtctctgcctcctatccagagtacaacctagccctgaaaagactgagcttccatgacatgaatctcgctgactgtcagagcgaggtgctctttttgctacagaatctgactctgcaaggtaagttccttattcagaacctggacatttcctgggtcttcactatggttctgccataatctgagtgagcaaaccactgttcctttcttggccttgtgtcctcagctataaaatggatatagaacctgcatgattttccttctaaaagccccaacctcaattcctcctctactaaacatgagaaatcgctcttttagagtgcttcacccaaaagttgctcttacctttcagaggtggacaaaatggtggtggtggggcaaaataaatgtactgtgccaggctcccctcatagacttttctctgatccccacccccgcatagagggtggccagtgttagggaaagaaggaagtgaatggagaattgtccatgcagagaaccttcttatagggaacatttaggttcagtctttagtttggattctgatttagttccagccttgcttggagtctagacaaattccttcctctttttgggcctctataatgttaataccccttgctagggccaactggggcaggaggggcagcaccagtcctaatgcagccatcagaatttactataatttttcttgacagagattaccttctccttctgccgtctgtttgagaagcgcccagcccaatttctgcctgagatggttgctgctatgaagggcaactccacactgaagggcctccggctgccagggaaccgcctgggtgggggccagaccctggggagggagaggggaaaggagctaggcctttgacctaaaaactcactggataaaggcaaagacc

SEQ ID NO: 482927 - DNA, 1000 bp, Homo Sapiens
gcgcagcgggaaggccaggcccccgcctaccgcccacgtgaccccgcgacggcccggcccccctccgcgaccctgcgcgcgcgcgcgcacgtgacccccgccccctcccccgcctgcgcgcgcgcgcgagcgcgcccctcaggccctcggcctcctcacctggcgggcccgctgcacggcgtcggcgaaagcgtccttgcggattcccgggccgcctccgccgggtggctgagaggggcccccggccgaccccccgcccgggccgccgccgcagggaccgccgccgccccggtcccccgcgcctggcgggcccggcggagggcctcccccggcgcctccggctcccccgcccccgccggcgggcggcggcggcccgggcgggggtcctcccgtgctgtagtccgacatggcgcggcggggccgggcctggcgcggaggctgaagctgaggaggcggcggcggcggcggcggctcaacgcgggaacaaggcctcgctccacacggccgcggagcactctgggaacccagccgctgggaggacgacgaggggggagagagtcgcccctcccgccgccgacgtgacggacgactccggcgggccaatgggaggcagccgccgcaccccggacaccaatcgcgagctctgtaggaggtggccaatcggagtgcaatgaggggcagtgggcgggaggctcagagtgactgacagctctcagaggcaatagctgcgagctgcccgtgctgggcgggcaaatgaaggagatctgagaaggcaggaggcccaatgaaacgcgagtgccagattcgcggggcggcttcagaattagattgacggttctgaagagtcacgtggactgtaaggccgggcctagtggaagactcctatggaccggctgggtgggcgttaggtttgatagtcgtggacacaagccaatgaatgcacgtgagaggtggtgcttgtaaagatgggcagccaattaatccaattcctgacgagttc

SEQ ID NO: 482928 - DNA, 625 bp, Homo Sapiens
tatttcaaccatcacctcatgtcaaaatgacctgatagttcaaatctttacacgtagatgaagtttcaatgaacggacaaaatctgaaagatcttattaaaaaatggtcaggagctacctagtctgataccaacactaaccaatgtgacaagggaggtgaaaaagtgccttgaatgtaattctgcagagcgcaggcctacctgagtcatatgcaaaatctctgggttcctgtttaatcatcagaggagggggaaagctttggctggccgcactgccaaccatggtgttgtgttcatacactgggtcgtggtactcctgcttaaagccttgtggtgggaaggggatgtttggctcagacatctggcgttggtacataggacgtccttcccttggcatcgtcggcaaaggaggaaaggagttacagggttcagaaagctggcggcgaaatctagggaataagagagtgtgtttcagatgaaacggtaacatggaacattctttaaaatacggatacggttttccatttcttagtgaacgaacatgataccagctgacctgaagcgtaaatctttaacaagcattacgtttttctttcctggattagtagctctatgttttttaatca

SEQ ID NO: 482929 - DNA, 1000 bp, Homo Sapiens
cctgccgcggcccgacggcgcagagttgggaaaccgaggcggagacgcgagaggggaggcgggcggcgcggtccgactgctttgtgctggggctcggctgccgggccgggagctgggagtccggacggcgcacaaagaaggctaccggcgagggtgcgcccggctggcggagggcgcgggtctccggagacgtgattttggcgtcacaactgctagaaggcgcctcagttctctcctggcgacgtgtccggttgtcccacgtcaaggcgctaacttcggccacaggatcactgaggctcaacttgagaagaatctcagcccggctccactcgggcagtgggacctctccgattcacaggcgcgtggctcgggcccgcggattttcttagctgggtgacacgatgttgccagcggcagcccgggactcctgcgccggagtttcatgcaacaatgtggcttattgaggggctgccggcccgcgggctccggatcagtgacgtgcgcacgcccattggctgcgcggggagggtgtgtgcgcccacggaccgcccgccgccgtggcgcagccaatcatcgctcacggctcgcgggcgcggccgctcagacaccggagccggcagcctggggaggcgcgccgggggcggggggcgggggaggggcggggcgcctgagatgggacgtgtggtccgtggctaaaggctgggacggaaaggcgcatgagccaccgccgcgtcaggctcggctatgggtggggggagcgtgatcgcggacccggggtgtggggcgactggaaaaacgggcctctggaccagcacacgccctgtgcggagagacactgtctggcatctcgggatcatgtgaggggctcccactgcccagtcacacgtctaaagcatcctagttcttacctattgtagcacggccggaaagtgagccgccttagctgctgattgtactagagcaggcaatacaagagtcggcccatcctcaaaaccactga

SEQ ID NO: 482930 - DNA, 1000 bp, Homo Sapiens; identical to SEQ ID NO: 309345

SEQ ID NO: 482931 - DNA, 1000 bp, Homo Sapiens; identical to SEQ ID NO: 309346

SEQ ID NO: 482932 - DNA, 1000 bp, Homo Sapiens; identical to SEQ ID NO: 309347

SEQ ID NO: 482933 - DNA, 1000 bp, Homo Sapiens
ctgcctcagcctccgcagtagctggaattgcaggcctgcatcatcacgcccggctaatttttgtatttttatcagagacggtgtttcaccacatttgccaggttggtctccaactcctgacctcaggtaatctgcccgccttggcctcccaaagtgctgggattacaggtgtgagccaccgtgcccagccaagcagattcttatttaaaaaccccacggctccacgccagggtcctcctcagagccactctcacctccttgttccacagagtgcacaccacagggttcagcagtggcatcaccaccgtgtagaacacagccaccaagcggtcctggtcggggttggccccggactccggacgcaagtagatgatggaggcgcagtcaaaatgtactacgaccacggtgacgtgggccacacaggtggagaaggccttgcgccggccggctgccaaggaaatcctcacgatggcagccacgatgaaggcataggagaagaggatcgggacgaaggacatcagcaccaccaggacgctcaggaaaaagatgcccagcgccttgctggcactcttggcgcagctgagcttcagcaccggggcgatgtcacagaagaagtgctccacgtggtctccgccgcaaaagggcgatgagaagatcatgctggtctcgatcaaggccaccgagaacccagagcagaaaaccagggctcccaggcagaggcaaacggtgggtctcatgaccatagagtagcgcagggggtggcagatggccacatagcggtcataacccatcagggtaaggaggaagcagtggctgcatcccagacccaggaagaaaaacatctgagcctgacagccagggatggagatggcctggtctccatcagcagatgagccagcatgctggggatggtgaccagcgtgtatagcaggtctccgagagggacagcaccaccaggaagtggtacatgggagtgtggcgggacctatccgcatgggtg

SEQ ID NO: 482934 - DNA, 1000 bp, Homo Sapiens
aggttaaatgggagacttggtaaaatggggtgttgtagacacaagggaggggaggagaatagtggctgagatggatgagagataatcaaaaggaaaccaaagataggaaaaaccaggtattgtaagaaaacagtgaagttagctcccattgccaaaagataataggttgttccgcttctgaggaggtggccttgtctgtcatggtttgtgccagtcaagggcatgtctgtcacggtttgtgccagtcaagggcatgtcctgggtacaggcaagctacagcgatgctgagaggaaaggaaccattgggggtgccgcacaataatagctaaatagagtggaatagaaatagaaacgaaggaacttttcaaaaaaagcctgagagaactataggtgttaagtttggaatttcaggaaacaaggatgtatcaagagttccaacctgaagaagcagagcaactgtccatcgctcagtttctagagctctgagggaaatctggaaaacctaaagcccgagaacagttatttctacaggactggggtatgcatggacaagtttttagttcctcacgttaggcaagaagtacacatttacaacaagtactttgttaaatgaaaatccagacgatgatggggaagccatctcagttccagcgttcatgtgggaaggggtacggggtggaccccaggcttgacaggaatttaagaaaaagtattttggatcttttatcctgttctttagggaagagcattattagcagtttagaccaagacttctccactagtttggcagaagtgcctatggtgaagagacagaggcagcaatgggctagggagggtggcaagccaggggccacagctttaaagagcaaaacatggatcatgttccaagtccatgttgtggaaaagagagttatcttccaggctcaacttgagctggcagaggaccagctcaatatcttctccgggaatgaaagctgtgcctttgggaacaggggacaga

SEQ ID NO: 482935 - DNA, 1000 bp, Homo Sapiens; identical to SEQ ID NO: 309350

SEQ ID NO: 482936 - DNA, 1000 bp, Homo Sapiens
caatactaaaaatgtgcgcgttccatagtgatcatggtgatcacaggagtcttgatggtccatggcatttatcctgtgctctcatcaaccaaatgtgttatgtcgtctccatagaatttaaaatatgttgattcagccttctcattgcaaacttcatatctttgttccttaaagtatagatggcaggatttaagacaggggtgacaacaaagttcatgatggcaaaaaatttatccaatgacttagtagggaaaggccacacgtagagaaacatgcatggagcaaaaaacaaaaccactacggtgatgtgagcctacgaagtgaagaatgctttggataaatcatttgaggaatgtcgttggacagtgaccagaataaaaatgtatgatacaattaagaaaaagaaggtgcccatcgatatgaatccactgttggcagtgaccacaaattctagcccgtaagtgtccatgcatgcaagtttaataacccgaggaaaatcacaataaaagctccccacattattagggccacagaaggttaatttatgacaaaaacaaactgagacatagcatgaatcaccccaatgacccaagctgctgctaccaaaaacatgcacattttgggattcataatagttggatagtggagaggcttgcagatcgcagtgtacctatcatattccatgactatcagcagcaccatttcaactcctcccgtaacatggataaagaacttttgtatcatacaattatggaaggaaataactttacaatcagtaaaaagatcgtagatcaacctaggaactgtggtagatgaaaggctcaagtcaatgagcgataggttggccagcagaatatacatgggggagtgtaagtgaggatcaaagatcactgtgaacacaatgaagaggtttcccaggataattcccacatagaataaagagaagaagagaaaaaggaaaaactgcatttccaaggattgtgcaagtccaagtaataca

SEQ ID NO: 482937 - DNA, 1000 bp, Homo Sapiens
ggctcattattatagcagttcttaaataaaacaataaatttgtagacaaatattcatgtataataaagttacatttgataaatgaaaattctcttatttatattttattaacatcttttccagtcctgaagattttcctcagataatctttcatctctttgttcctgagactatatattagaggattacagagtggtgttatcacagaaaagaacaaggtaatgattttttcatttttactgggtgtgctgatccaggactaacatacatcaccatgatagagccataaaataaggtgacaactgccaaatgagaggcacaagtggagaaagcttttcgtttgccagcctctgaaggcatccgtattatagccagaatcaccagagcataggaacaaaggataaagagaaaggtgccaattatgaagacagaattgaatgtggagtaaatgagctgggtgatgatgatgtcttcagaacaggacagcatcttcaatgggacgggatcacaaataaaatggttgataatatttgggccacagtaggatagctgtgaaatgagaatcaccagagttaggaagattacaaagacacatgaccatgcaaaaatgatgaggccagtgcatacttgtttagtcatgatgcatggataacgtagagggcggcagatggcaagatacctgtcaaaggccgtgatgcaaaggaagaagccctcatcataccccaaagagaagaagtagaactgtgcaaaacaactcatgaatgagatggacttgcttgtggagaggaagttggccagcagtttagttgcagtaacataacatatttccaggagagagaaatttcccaagagggtgtacatgggagtgtgaaggtgctggtcctaccacacagcacagacaatggctgcatttcccatcggggtgagagtataggctactgagaagagaccgaagtagaggagctgcatttctgggcttgagggaaagcccatgaggata

SEQ ID NO: 482938 - DNA, 1000 bp, Homo Sapiens
gccgggaacactccggggctgaggcggaggagaagggaggcggcggctgggcaggaagccggggtcccggggctggcggcggcgggctgcgcggcggtacctgtcatggtgctgccgggtgcgcaggcggccggggcagcctcaggttggtgactcagagaagccggcaccgggagggagcgcggccagcgaggaggcacggcggggaaccgagcgtctgccccgtgcgctcttatagcggccgtcacgtggccgcgcacgctctcgctgccgtccgcatcctcccagctgcgcggccggcaggggcggtggcccgcggggctccgggtcccgcgtctccctcggctcctcctccctccctcggggctaggctgcggctgcggctgcggctgcggctcaccggcgcccctgctcctacttccccggggcgcctgcccttgtcaaccgcgcgccccctgtcgccgctaaacctgggagttaagggggactttggggctgagtgcggcatcaaactccccaagaagccaagggttagggaaccttaaaaaacaagcaaacaaaccccagattactctagttaaaatcgtgagtctgaactgcttgaatgaaacgtaaaatttacgctttttttgcagaatttcgatcagcctctataatcattccttagtgtactcacaatggttttgtacccttaacctaaaaaatatagtgaatatttcgtaaatgttaaattcttggagccatctgcatcaattaggcatttaagtgcttcatttaatccttgtacgaactcagtgaggtgttacatattcattttacagacgaggaggaaactgagctcagaaaagttaaattaacttttcttttctttttttttttttcttgtatttttagtagagacagagtttcaccatgttggccagcctggtctggaactcctggcctcaagtgatctgccagccttagcctcccaaagtgctaacttttctatagtcatata

SEQ ID NO: 482939 - DNA, 754 bp, Homo Sapiens
ttttaccagccatctgggcattcgttagcccggtcaggttgacacatataattaaccatcacagatctccctacattatcaccactttcctggatttttaaccagcattcttcttgttcctcaggctttaaacagggagttcagcacagacctcaaattgtaacagaaaacagaaagcaacatctcctggttcatagaccctggagaaaaatatttgagatacatgaatgccactgactcaaagaaaacagaaatggcattgacgtgaaagctgcaggtgctgaaaggttttagtttgccttgagcaagttaaatgaaagtaagagaagcaaagactggatactgtactattaatacccaccacagtgaaaaccactacttcattggcacaggtgctggtacaagaaacttagaggaccaagaggctgtcataagatgatggttgatgacatcaatactacaaaaggtcggcctaagtatgtgccctgtgtgggagtggttccagcaaatccagtctctctctctctctcacctgaggagacatggtgacctcatgcaatgatggattgtagatggccacaaagcaaccacaggctatgaacatcaacacgtggtatttatagagaggacaataaagagaaagaaaagctgcgaggccgggtgcgatggctcacgcctgtaatcccagcactttgggagactgaggtgggaggatcacttgagtccggaagatcaagactgcctgggcaacata

SEQ ID NO: 482940 - DNA, 1000 bp, Homo Sapiens
cattttggcaaaaacaatttattaattttatcacaaattttgtctttttaggacttacacttttataacctgaaattctctcccattcaatcaatttttagtaaagagactttctacccgctcctggatttgcttggtcctaactccataaatgactgggttaagagcagggggaatgactatatatagagattagccaggagaatatggatatactgtgggatgccatgaccaaagcgatgagtgagaaaggagaagagagctgggccaaaaaatgctaagatgacacagatatgggagctacaggtattaagagccttcaggtgggcctcttgggaagggaggtgaaagactgtgcataaaattctagcataggagatgatgataagaaacatatccagaaacaagataaaaatattcccaagaccatgagagacattgacactgatgctggcacaagccagacgagccactcccatgtgctcacaataggtataagggatgattctatgtccacagtaaggcagcctcatgaggagaaaaatgatgggagcaatcatacataagcttctaagaaccacaaccatagcaatcacaccagtaattctgttggtgaggatcttggtctacctgaaggggttgcaaatagccacatagcgatcaaatcccatgacaagaagtacaatgctctccatgactgcaaaaaaaatggataaaaaagacttgagcaacacagcacccaaagcacaactcctgaaggctgaaccagaagatgcccaacatcttggggatagtagatgtagaaagactcaggtcatgactgacagcatggccagaaagtagaacatgggttggtgaaggtttttatcagtccagataacaaatagaatgataagatttccaacaagagcaatcagatatacaacacagaagggaaagcctagccagcgttgtgcagcttccaatcctggaattcctaaccaacaggaaggaagagagg

SEQ ID NO: 482941 - DNA, 1000 bp, Homo Sapiens
atgtttaactataatgaaggaaagagagtgttgagaggatatatataatagaaagcatttactgtaacttggttttttttaaaccttattaatactttcatttaccagagaaaaacataaccttttggatggtgtccttaaaggcttgcttcacttgctggttcctcagggtgtatataaatggattcatcataggagcaacggaggtattgagaatagctactcctttggtcaacgacgctctttcttttgcagagtgattagcgtacatgaatatgcagcttccataggaaatggaaatgacaatcatgtgagaggaacacgtagaaaatgccttttttcgctgactagcagaggggagtttcaaaattgtcctaatgataaacatgtaggatagaatgattaatgccaaagtgaaaagcagaattactattgcagagtaaaaaccaatcacttctaggagccatgtgcctccctatgcaggataattgcaatagggagaaatagtcacaagcaaagtgatcaatgacattggagccacagtaatctaaccggagaaaaagaataactggggggaagatatttaagaacctgccaaccaagcacaaaagacaagcaatatgcagactctcttgttcatgatggtcatataatgaaggggtttacagatggccacataacgatcataggacttggctgttagaaggtaaaattcagttatacccataaagatgaagaaaaacaactgagctgtacaactattgtatgaaatagttttgtgtctggtgataatggtggccagaaatatagggaaacagagagttgtaaaggttatttctaatacagaaaagttcctgaggaagaagtacatgggggtctgcagatgggagtccaccaaggtgagagtgatgatggtcaaatttccagtgacacttaatatgtacatgataattaaaaagagaaaaatcacaatctgaaattctgggtcatctgatagccc

SEQ ID NO: 482942 - DNA, 1000 bp, Homo Sapiens
ctcattattatagcagttgttaaataaaacaataaatttgtagacaaatattcatgtataataaagttacatttgataaatgaaaattgtctcttatttatattttattaacatcttttccagtcctgaagattttcctcagagaatctttcatctctttgctcctgagactatatattagaggattacagagtggtgttatcacagaatagaacaaggtaatgattttttgcatttttactgggtgtgctgatccaggactaacatacatcaccatgatagagccataaaacaaggtgacaactgccaaatgagaggcacaagtggagaaagcctttcgtttgccagcctctgaaggcatctgtattacagccagaatcaccagagcataggaacaaaggataaagagaaaggtgccaatcatgaagatagaattgaatgtggagtaaatgagctaggtgatgattatgtctgcagaacaggacagcatcaccaatggtacaggatcacaaacaaaatggttgataatatttgggccacagtaggatatctgtgaaatgagaatcaacagaattaggaagattacaaagacacatgaccatgcaaagatgataaggccagtgcatacttgcttattcataatgcatggataacgtagagggcggcagatggcaagatacctgtcaaaggccatgatgcaaaggaagaagccctcatcataccccaaagataagaagaagtagaactgtgcaaaacaactcatgaatgagatggacttgcttgtggagaggaagttggccagcagtttaggaacagttgtaataacataacatatttccaggagagagaaatttcccaagagggtgtacatgggagtgtgaaggtgctggtcccaccacacagcacagacaatggatgcatttcccatcagggtgagagtataggctaatgagaagagaccaaagtagaggagctgcatttctgggcttgagggaaagcc

SEQ ID NO: 482943 - DNA, 1000 bp, Homo Sapiens
ggaaaccttaattgacttagaagtctaacaatctcgcaggatagatgttgtctatgtacacctctactaaaagaagaggaacactcattctaactatagttaagtttttatgccagggtttttttacattggcttttacagcaattctcatctctaaatttctcagtgtgtatattaaaggattcaacatgggtgtgtgataactgtataaaacacagtcatgaatttatcaataggaacgtttgaaacaggtctaacaaaaaggaaaacacagggaacaagaaacaggacagtgactgtaatgtaggagatgcaggcagaaagggctttacacctcccttcctggcaataagttttaagggtgtttaggattactccataggagattagtagaaaggtgaagatgaccatacagattgctagaccattggcaacaacagtgaggcctataaagtaggtatcagtgcacgccagttccagtaatgggtacatgtcacagacaaagtggtcagtgacattgggccacagaatgagagagtgtacacaacaacaatttgaaacacacagctcacaaaacctgcagacacagccaccaccaacagaaggatacaaacctgttgattcatgatggtcaaatagtgcagtggcttagagatggccacatagcaatcgtaggacatccccacaagtaggaagacctcagcaccaccaaataagtggtctataaatagctgccccatgcatgctgtgaagaaaatagtctttttgtcatggagtaagtctataatcaatttggaagaaatggtattggaatatgccacatccataaataacgggcagtgaggaagaagtacattggggagccaaaggaggggctggcaataatagccaccacagcgagcaagtttcccgccatactcacaatgtatgtgagtaaaaccatgacaaataatgcattttgcacatcaggacactgagtgttgcccaagaggacaaattc

SEQ ID NO: 482944 - DNA, 1000 bp, Homo Sapiens
ttaaaattgtaaagccaaggctaatttgtataactcgaggccccctatttttgcaaagtttaaaaagaagaagttagaaatttgccttaaaaactgtttatttatttattattctcttcaatgcacctatgacctctttattcctcagactgtaaataaaaggatttaccagaggaattattatcatgtaaaataaagaatatattttgtcctgatctgcagctgatccagacccaggacacacatacatgaagaagagagtgccatagaacaaagagacagaaagcagatgggcactgcaagtggagaaagctttccttctacccttctcagacttctttttcaggatggccaagaggacataggagtaagagacgatgatagtcataaaagtgaaagattgtataaagactgaaaatacaaaaaccaggagcatattactccagggtcagtacaggaaattttaaacagttgtaaaatatcacagtagaaataatgtattacattggacttgcagaaagttaattgaaataacaaacccacatgcgttataggatgaaaaaaacaataataaatgaaacacctgataattgaatgcagaaggtattggacatcactagaggataaagcaaagggttacatatggccatataacagtcataggccatcactaccaggaggaaacttcctgtgtttgcaccggaagcaaaaatataaaactggatcatgcacccaaccagggatatcatatgattcttagataaaaaatgtacgaacatcttgggagtcacagaagatgaagtgcatgcatctgcaaaggctaaactgccgagggataagcacatgggggtgtgaaagtggggatccttccagatgagagccatcaggccacggttgcccaccgtggtgataaggtagatcaccaggaacaccaggaacaagggcgcctgcagctctagaagatctgtaagtccttggaggacggagttcataatctgtg

SEQ ID NO: 482945 - DNA, 1000 bp, Homo Sapiens; identical to SEQ ID NO: 309353

SEQ ID NO: 482946 - DNA, 1000 bp, Homo Sapiens
aaaacgcacttcagatttacttctctctatctgcccggtctctggttgggatttaacaaatgtctgaaaggcagctggcaggaaagatttgggtaatacagtgactgaaccatcagctcccagataactgggtgtgggctactgagttgatatacacagcagaacacttttaatttgagtcatactgatcaagcataaagaagaccaatgcttttgccattaataaccctcctggtttaaaggaggatgaaatattgacagagaagcaagtttgccaaatggaatagctgtaaatgttttccagggaagtttatcaactggcatcatcacttgattgagtaggtcttgccaagatgaacacagagatgtgaacagaccgatgggggtactgggattggggggtggcaatgggggaagtgaaggaagacatatcaaagccgctcttcctgcacgtacttctgtttgtcccgggactccctggacttgggccggttctgtcggtttgctgtggatgggatggagtgaacagaggagctcttcttgctggaggactgcgacgagtgggaggaatgggacaggctggcccgggactggccggcattgtggtcaaactgcattaagcagaagatcaggtccgtcggcacgagctcaaactcatagggcgggttggtgatgacatacctctttgtgcactgactgggggtgctgaggtgagcatctctcagccggtaaattccaaaacaaagcatattatatgttttcagagctttgcagaacagatcaccataacaaccaccatcccctaagtccgcaaatggcccatcgagcagagctaactgggccacgcggcagcggtccctattggccagtgtctgcggggtgctgtagccacctctaagggcgttttcctcagcaatcagagcctccagctccggcgtggctcctccggtcaccagggtccgtatcagggtgaggatattgtcattgaagtacgtcgcgc

SEQ ID NO: 482947 - DNA, 1000 bp, Homo Sapiens; identical to SEQ ID NO: 309354

SEQ ID NO: 482948 - DNA, 1000 bp, Homo Sapiens; identical to SEQ ID NO: 309356

SEQ ID NO: 482949 - DNA, 1000 bp, Homo Sapiens
ggatcctggaatctcgggaggtgacagaccagtgcacgtattgcaactgaagctgtctactccagttttaactcctagaacttctattcctccttttatgacgagctttggcacttgcactggttcctttggttttttgggagctgcccctggacaacttccttttctttttgttggggccatcttcataagcttttagagcagaagtaacacttccgtacaggcctagaagtaaaggcaacatccactgaggagcagttctttgatttgcaccaccaggagcctcaaatttttcaataaattcacctgactgcacattaggactttggctttgagcttcccacctctcagttacttgctgaatactgtctgcttcatcaatattatcataggtgtgcccaaatgatatttgcaacccttccctgttggctacttgtctcaccattgtaggcctaatgggagacaaagtagagtagtaatcttgtaaagagttataccaattaacaggagcattaattactgtccaagtagtttcctctaaaaaccttgccaaactgtcccttaaatatctttgggttcttctttcaagctcctgtgaggtgagcctaggaatgtcattttgtattacacgccaaaaagcttgagaaatggcattaaaaagtgttggaccccaatgtctggggtcaagatactgaacactgtgaacaaaggtttgtactccaggaaataaaatatcataataatcatctggcctatacaaatctacagccattcctggttgttgatataaaccaacagtagaaactttgtgatcccagtcactaaaaaatctataccctacttgagcaacagcgctcacaccagtcacagtttgcagtaaagctgcaaatccagctatagcagcaggagccccagatatcacagcataggcctgtggagtgaggcctatagcagctattgcctcagaggttgttaggccttcaacagtagcaacagatgc

SEQ ID NO: 482950 - DNA, 1000 bp, Homo Sapiens
atagaatcccctagtgcttgttttcagggcagtgtgggttgcttcccaggatacaggtagaggtcactaaaaggatagttttctactcaaagagccagcactccagcccttgccttcccctgccgtagcactcgggccggccctccagttacctgagtttgcctgactttaaccaactcctcttcccttccctcctcccttctccagcgggctctccttccagcttcctcccgggctgcaattcctctgcctaggtgcctccgtccagctccggcttctggcccggaggctgctcatctgcccctacccccgctgacttttgggaggagcaacacctttcaggtcagcattgctaaccctaaactttccccgccggatgcccgcgaggctgctgcggcggcggctgctgctgatgggagagtctcgagtccggctttcatcacatcacctgtctgcgccccttccccctccccgctctttttttcttttctttttattttgacgcaaataatttgcattctgagaatcccacaatcaacgccgaaactcatgctcaaggatacaggtgaagatgcctttgacaaaggcgaatgcgagccgagtgcagtttgtaaaagctggggttgggggcagtggtggaggcaaagcaccttaagagtatttttagcccctcagagaagggacatccgggcgggaggcgggcggatcccgggcttccccgccggctgcccgtctggctcctggctggcgttctctccaggagcccgcgccggtggccccgctctccccttcagcacgcgggcctcgaacccgcatcccggagagcggccgcccggcagccctgccgaggccgtcggaggactcagctcgccatgggtactcacttttgccagggagcaaagtctgccacatcagtcgatgagtacttcctgcacgaggacatgaagctccattgtgtggaaagctgtttcgcgaacggtcggtaaaatccagaaagagg

SEQ ID NO: 482951 - DNA, 1000 bp, Homo Sapiens
ttttttttcatgaagactgagtgaagactttattgcaccatcacatcactaaggtttttctccaacatgaacattctgatgaagtcgaaggcttgaggcctgactaaagcacatatcacactccctacacttccatgttttctctcccatgtggaccctctgatgcatatcaagattcaagcgcctgttgtagcccttcccacagtcctcacatttgtatggcttttctacactgtgaactttttcttgcacttcagagaatgaattctgtacaatgttcttcccatgctgctcacatttgagaggtgtttctctgctgtggcgtctctgatgggtcagacgagttgaggaccagctgaagcccttcccacactcatcacatttgtatggcttttctccagtgtgcactctttgatgagaatgaagctgtgaattctgagtaaatcttttcccacactcttcacatttgaaaggtttttccccactgtgcagtctctgatgtttcaaaagacacgaggcccagccaaaactcttcccacattccttacaattgtatggtctctctcctgtgtggaccttctggtgcatatcaagattaaacttactattgtggccctttccacacttctcacatttgtatggcttttctccagtgtgaactctctgatgggaatgaagatgtgaattttgagtaaatctcttcccacactcttcacattggaatggtttttctccactgtggagtctctcatgtttcaaaagacatggggcccgactaaagctcttcccacattccttacaattatacagtttctctcctgtatggacgcgctggtgaaagtcaagatccaacctccttttgtagcccttcccacactccacacatttgtatggtttttctccactatgggatctctggtgggaatagcattgtgaaattgtgtaaaatcctttcccacattcttcacattgaattggtttttctccactgtggactcgc

SEQ ID NO: 482952 - DNA, 287 bp, Homo Sapiens
gaagtgctgtgttgtctcatagacgcctccagcagagccagggtgctgcattccactgaccagtctgacggtttcactcatggaatttctgaaacagaaagtctcttgatacaataaaatcactataaagtttttttttttcagtcacagatctccaatacttttacttttcaagtctaatatattacatcatttaaaaaaaaaaacaggtaaagtatctttaaaaatcgagttgtgttcaaaattggaaaataatttataaaacgacattatgcctttatatttta

SEQ ID NO: 482953 - DNA, 1000 bp, Homo Sapiens; identical to SEQ ID NO: 120069

SEQ ID NO: 482954 - DNA, 1000 bp, Homo Sapiens
ccaggacataggaggcaagaagaggagtataaaatcccaagctattttcaccaccccaaatcttatagagcgtcagaatatggacactaggaaaatatggacacccacctttcccaggctgggaaaagttggaaaatttctgaagttctaccactactgactgctgacttttgacaaagccccaaggaaagtaaaatagaggacattttacccaagcattaagggctctgattagtgtcaactctgtactgattcatgctaggggactggtatcagaactgtttctataaactgactagctcacaagtgggggaagagacttaagtaacacttaaggcaagaaatataacctacagattggtacaggattacttgcagctttaacactgatattttaaactctcctccagtttcctgggaaacctgatctagccgtactgttgctgtcatctgcatgtacaagactcagcaatcataccctcatactccttgtacaaaatactcccatttgcctcaatcataaggacactaattggaacatacttatacgggacacaggagggccgggggacactctggtccaccaactgattgataaggttctgaataatggcgtgattgggggaattgagaccatcgcgtagtactcggagacaagttcctttacagtagtttggggtgtagaaagggggagcaatgatccagtgatcccaacccagctggcggaagctgatttggaaagggtggagggaacactggttattttcaggcccgctatgttttgaggaagaggcagtaacctcagctgagataccatctgcttgtcgggttctccggagaagagattccctttccatgaactcctccatgcccctgggaagaaatttagccttccgaatgcttttatgagtatcattgaaatagagtaacaagaaggcaatgtccaaggatgaagtgccatgccagagctcaagaccaccactatctttttgctgctgac

SEQ ID NO: 482955 - DNA, 1000 bp, Homo Sapiens
ttttgaaggatagttttgcgagagattaaattcttagttgataagttccccccaccacttcataacttaaaatatataatcccactgccttttggcttgtaaggtttttttcactaagaaatccacaggtagtcttattgaggatcccttgtacattataagttattgctctcttgctgctttcaaaatttgttgacttttaacagtttgattataatgtatcctggtgtgggtctctttgggtttatcctacttgaaaatctttgagcttcttggatttttatctccatgtattaccttaaaattgggaagttttcagccattatttcttcaaataatctatccccttctctcttctccattttgaattcctataatgtgtatattggtctacttcttcaggtcccttaagtcccttaggctcatttttttattttttatcatcttttttctttcctttttgttttcagacttgataatttcaaataactggtgttcaaactcaatgtctgctttctttcccctctgttctaggctacagttaagcctctttggtgaatttttgaattcccttaagtatttttcagctcctgaatttaattcttttttaaatatataatttctatctccctgtttatattctaattttgtttatatatatagtatatatatatattctctctatatatagtatgtatatattctctatatatatagtgtgtgtgtgtatgtatatatatatatatatatatattctctctctctctctctatatatatatatatatatctctctctctctctatatatatatatatatactaccttgcctggcaagtattgtgctttttaatttttattttcaccactatatatatattactatatatataactatatatggctatatatatagttttcctgatttcctttagttttttgcccatgctttaactctttcagcacttttaagatggtcatttaaagcctttttctagtaa

SEQ ID NO: 482956 - DNA, 511 bp, Homo Sapiens
ctaaaaagcagaacctgagtgtcagtgtttgtccccacaccccatagcatccctgctgaggagttgaagtccagtctgaggtgcaggaggtgaaggcatcaaaggaacctagctctccattcagaccacccctaaggaggggaaaggccagacaataggtccttggatacagtgggtaggtgagagagtggggaagcaaatctctgctcctcaggaactcatccataaccttagaccctaagatcccaatcaccagccctaagaatcagtccgtcagagctatcaggactgggatccagagcaacagtatgtagagtaatttccctagcatctggaaaggtgatgagatcaggattcttctgatgcactcgccatggaactagaggtgctctagtctcctgtgattcccagctcagtagtgacatcagggataagagatgggaaggaatgggtcagaaggagctctttgtcttgtggggcccataataacagaaactcaatatctccttac

SEQ ID NO: 482957 - DNA, 1000 bp, Homo Sapiens
ctggagaagagagaagaggattgatcagcacagggtatcctggtgggcctgccatctcccccacccttcaggggccccctgcagcttcagacagagaaagttgaggtccagggtgtattgtcatcacctcccccaagatctgtgcaaaggtgaaatcagctcacgaggacacagaacttcagcttgatgcagatgtgtgggaggtggggaacagctgttattcttctggggaatatgaagggttcagtctttttaggaaattggatgatatctcatcccgaccactagcagcctctttcagtcactggaaaatgcctacaggcagtagccaccatcatgtggcacaaagtgggcatcatcctagtgtctaacatttaagctgtggttctggctccacatttcacaagaagatgccaccaaagttaaggcttggttctggggaacaatgtctggagattcctagaaactggcaaacttctcccctaagtcttgatcctcatagcagcaaataggccacgaacatggaccactgtggtcaggtacactcagctcatgctcttccctcttatacctgtgcctccccacactggatcatggctgaaatattacctgctggtggaggcccttgaggtcttacaaaaggaagttatgcagagaaaggtctcattacacaaacagccactctctcaccccaaaggaaaatgacacacatgacttagagttacattctcttcccacccatgttcttccaggccttcagcaccctaatttaaaatcccctaaaacaaaggaaattgtcaccagaaagaaaggaggctgaggctctgaccctcttaatggaggaagcttttggaaaggagccagtgagacaatgatgaatggtaaggatgccctggaataagctctatcagtcagctctgtgacagcgctacctttcaaccagtaaaatcagattccaatgcctcctcccatcttgtcctgtctcctcgcacttcctctc

SEQ ID NO: 482958 - DNA, 1000 bp, Homo Sapiens; identical to SEQ ID NO: 309359

SEQ ID NO: 482959 - DNA, 1000 bp, Homo Sapiens
catctctccgggccgggcagcaacggcggcggcgtcccccgcccagccgcaccgcctggccagccacagctcggggctgctccgcgcccgccgggctaagcagctgccatcgcgcgccgcgccctcgccgccgcgccgccgcctcctctccggcgccctctcccccgagggcacgccgctgcccggcggcggctcgctcctcctcggcgcctccgtggccgcgccgctcgccctctgcagagtttagagtacaaggggtggggaagccgggtgagcgggaagggacggagcttccttttcttggccggctgacaagtcggctcgcaaacctgcgccgcggtgcagctcaagggcgccgcgctcggggtgcagcccgccctcgccacccgccgcgccgcgccgcgccgcgccgcgcagctccttccgtcccggccgctctgggaggggccaggaagggcgccccctgggtgcggagctacctggcgcgcaccttacgagcgggctggctccccaggcggcgtcccggaacagcagcagcggcagccgaaaggaccctcctccctcttaggcggcagctcgccttcatcgggtggatttcctcctccttgcctggcctcgtttctctttcgatcgcctccgccgcgtggtcccggcgccagcctcgtcgttccttgcagacgctctccctctccaccaccagcttctggccacccactcgtagcggcaccgagggtcagggccagcccccaaggagggcgctgctaggaagctcgagcccggactgaactgaccgcgctgcggccctgggaccccagccctcctctgagtgctgcgcgtggcatagggtcccagtcttcacccacccggcccccacctacgaagacctggagcgcaagcgattacggggtggcgcagaaagtccctcgaggcaatactcggtcttcggagtccgcccctgaagcatttccagtgttccccgcgactagggcgcccccctccg

SEQ ID NO: 482960 - DNA, 1000 bp, Homo Sapiens
gcagatcacctgaggtcaggagtttgagaagaatgcaggacagtgtaaagatgagattccactgacaactctgagccctagttgtaggcaggaataagtgaagagagcccgctggaggaggagtatttggactgtgcccattccacacagtatgtggcctaagggtgagcctggagacagcattccaggctggaggtccaacataagcaagggtgggaactgagaaagcatgtacagggcatgtggtggaagcagtggatgactcaaggtgcagagcccagggaggcaaagaagttggcttggtaagccatgtggaggggcagcgggaagagtcggtgaagcaaaaagaagcagatgggaggggcatttatgcctcaaatggagagttttatgcccaaagctcataagagcaaacacctgggttgccatcactgctgcactgcacatatacgcatgcacacatgtacacacatgcacttgtgcaaacacatgtgcacacatacacagacatgtgcacacacccacatatacatacacttcttttttttcttttctttttttttttttttttgagataagagtctttctctgtcaaccaggctggagggcagtggtgcaatctcagcttgctgcaacctctgcctcctgggttcaagagattctcctgcctcagcctcccaagtagctggaattacagctgtgcaccacgaccatgctcagctaacttttgtatttttagtagagatgggtttttgccatgttggccaagctggtcttgaactcttgacctcaagtgatccccccacctcggcctcccaaagtgctgggattacaggcatgagccaccacgcccggccatgcacacacactttttaactgctttgtgttctctggccctttcgcctacagaattagctatcgagaccaagggggttctcttggcctcggtccagcctttcctgaaccccacaccctgcatcagcacacactgctgtccact

SEQ ID NO: 482961 - DNA, 221 bp, Homo Sapiens
ttcaattgaatgttcctagtgcaactggagggcttctgcaggttacaggagactgacaatctggacccagtcttcatccaggtgcctaatagtcaatgctcatttccttgtttttaatcgttttctttatagaaactaaatttcatttaaattattcttttcttccctcagcctcctgagcggcgcgggcgcgggctcgtctgcggtacggctgccgggcc

SEQ ID NO: 482962 - DNA, 1000 bp, Homo Sapiens; identical to SEQ ID NO: 309360

SEQ ID NO: 482963 - DNA, 1000 bp, Homo Sapiens
gccacgcctcagtcgcaccgcggcgtgacagagtcgtaataacgtcatgcgctgcgccgggccgcgggccaaccagaacggcgtccagggggtgccccgcccccgctaaaggcctgaggctgcccattgggtatcagcgccagagagggaggggctgagggctctttccgacgccacgccgcgggcgggtgaggaggcggggcttgatagcgcctgcgtgggaaggtggggcccccgcctccagggcgccgcgggaaaggagccttcctagattccgctctgctgactaccggggaggttgtgcaggccccgtcctaccgagcgcctactcctgccggtgctgcagctctgcagccctcgttcagtacatctcgttcagtacactagatgatgaagattagcagcatgctcagagccaaaagacagaacatctggtttctgtaaatggtctgccactaactttgtctttaaaagatcacgtagcagttggacagttctgccctgtctacttgaacgcggatcaaaaaatttgtttcccaatatatgtcgagaggacaatgggaaaaatcttttttctctagttattggttcacaggctcactgcgagttaacagcgtggctcagccgatgataaaagcacacacagagacaaaacaccaaagcaacaaggggctctattcagaggatcaaagggctcaggaacccattgtgttgtgtcctagtgggattgcacctggggttccgggttcagatttgggctccacattttaagggggataatgagtaaactgagtggaatccaggggacagtggtcagaacggtgaggggctgcgattgtgacttatgaagaacgattaaagaagttaggaagaaaacaggctaactagaattggctgggttatgatgtaacactgacctccaattcagtgattcaagaattgaagtgacgcgagccatcgtactcgtaacacaggtccctcacagcgtggcaccctctct

SEQ ID NO: 482964 - DNA, 1000 bp, Homo Sapiens
tcgacggcccgggctggtctgggcagcacctgggcctagctgaatatcctccctctccccgacccccacatagccaggagaataagaacagaatataggatcctccaaacagggcacaagaaggactccatgaccaggagtcaggggcctgggtttttcagaagcagctactgcataacaggggacactgggtaaatcttcccccctctgaggactctggctgctgtctgtacaggctgaaactgatgctctctgacctcccttttctgagactgtcctgttgatgactgccctcctcccaaagaatgatctgactcatctgtgacctgccaggctttagccctccttctctcagtgtccctatactccagacacactccttcatccagaagaaattattccatttctgtggtggggggaatgaggtgcaaggcccagtttcacgaacttaacctgggcctttgggcatcaaacatgacaaagaggatctgaagttagactcaaggaagaacttcccaacacaagtggcctgaaaacctcagcttgtgtgaagtgcattaagaatatatactagtggccggccaggcacggtggctcacacctgtaatcccagcactttgggaggccgaggcaggcagattatgaggtcaggaatttgagaccgaccagcctgaccaacatggtgaaaccccatctctactagaaatacaaaaattaaccgggcatggtggcgtgtgcctgtaatcccaactactcaggaggctgaggcaggagaatcgcttgaacccgggaggcagaggttgcagtgagccaagatggtgccactgcactccagcctgggcaacagagtgagactctgtgtcaaaaaaaaaaaaagaaagaaaaagaaaaagaaagaaagaaagaagtaatatataccaatggcgtccaagagaccaggaaactgttttggacctctgaatagtgccaatgagacagagagaagttttgactgtggtta

SEQ ID NO: 482965 - DNA, 1000 bp, Homo Sapiens; identical to SEQ ID NO: 309362

SEQ ID NO: 482966 - DNA, 1000 bp, Homo Sapiens; identical to SEQ ID NO: 309364

SEQ ID NO: 482967 - DNA, 1000 bp, Homo Sapiens
tttttttctttataaattacccagcttcagatttttttatagcaatgcaaaaatggcctaatacacttcagaacctggaagattagcagtgagaaataaaatcagttaagttgatgacttctagtatttcactacatggttgttttgccaaaatgaaggcaatatcagtgtcttcacacttaaaaagtagtatattgaactttgaggtgaaagagctggggtttaaatttgtactttaccaattattgagataagtgtccttgagcaagttacttgctttctctgatctttagttttcttatttgtgaaattggaaatggtggtgtttcagaggggggttgtatataaactttgtaaactatagagtgctgtacaaaggtaacctgctagtataattgtttgcagtcgttttagtcatgtggtacttaaagaggcagcagagcctaccagaataatagagccaatccttattggctgtggcccccaacctgaaccactcaaatagttccagttagcaccattttctctgattcttgctgtagagtcccttgaagtttaagtaaatgtgggggtagtttgactatatagtgaagggctagtttgactttataatgaattgtcctgggagtccttgagttcattgttttccctaacttggctagaacctcaaaatatctgacattcaaagatgtttggatgataggcaaatagaaatttttactaggttccagataaagagcaactgaaggtatggatgaatcacagggtaccctgactcaaatttttgcagagaaattccattcagggggcagtgtggtatggtaaaaagaatagtggatttagaacaaaatgggccacagtttgaatcctgtattgatctgctatctgaggctcagttttttcatctgtaaaacgggggctatattaggacctacctcatagactttatgtgaaaattaaattgaagaacacatgtacaagggtcttgcacaatgtctgc

SEQ ID NO: 482968 - DNA, 1000 bp, Homo Sapiens
gagagtttggttaagttactcccccatttactctccatttcttcatccgaaaattggaacactaataatgccttcctcataaggttgctataagagctaaatgagagggaaagaaaatatataaagtacttgtcacagtatctgacatatagtaagtgatatggtttggatatttatcctgttcaaatcacatgttgaaatgtgatcctcgatgttgctgtaagagctaaatgagaggggaagaaaatatataaagtactcatcacagtatctgacatatagtaagtgatatggtttggatatttatcctgctcaaagcacatgttgaaatgtgatcctcgatgttggaggtggggcctggtaggaggtgattgggtcatgcaagtggatcccttatggcttggtgctatccttgtaataatgagtgagttcttggagatctgattgtttaaaagtatctggcacctccccaccctcgctcctgctctcaccatgtggtgtgccttctcccacttcaccttctgtcataaggtcatgagtaaaatctccctgaggcctccccagaagctgagcaaatgctggggccatgcttgtacagcctgcaaaactgtcagccaattaaatatcttttctttataaattacccagtctcaggtattcctttatagcaatgaaagaacagcctaatacagtaagtaatggatacatgctaattattattatttaatatagacaaaataagtctaaaatgattagcaattttttgctaagaggttagagaaaagtccccactgaataatattgcttacttccttggaaaattagagtgggaaaggttgagctctaattcaaataaacaaattatctatggaactttagtgatacttcattgcactgtaacatggtattatcatgtcattaattgattttgtggctttcaacaactattatctctcgtgaccttagtctcttcatttgcaaaatgaagaagattaactag

SEQ ID NO: 482969 - DNA, 1000 bp, Homo Sapiens; identical to SEQ ID NO: 120070

SEQ ID NO: 482970 - DNA, 1000 bp, Homo Sapiens; identical to SEQ ID NO: 309369

SEQ ID NO: 482971 - DNA, 1000 bp, Homo Sapiens
ctgaaaaacatgttttaagtagattatttttagaaagtaaatcctcatgtaagaccacaaagtatataaaagttcagcttggacacctttatgcatataaataaattcaagtttacttttttagaaacgttcataaaataagaaaattcagtagtggaaactgagttttctttaagatcaattctgttacagtctctttccctctagctataaattcaaacagacttgaaattccattttcctcagtcacatgtatgtttctatgactttcatgcttactcttttttggtatgtcttcaaataccctctttgcttttgcaaatcctcccctcttccatgaggcctcccttcaactacaccagtccataaagatctcttccttttctgatttgcaaattttagcacttaactctgtggtaatgagtcttatatgtgcccttatggaatgtgaactatcggacagcagaacttgtcacattcctttattaacatccttcaaaaccgttaacaaagagctcaggagttaagtatgcaataaatccttggtaatcatgcatttctccatgaatcctacactaaaagacatatatatgaaatggctgtaatcacactcaccgcaagtcaggaaataattattaccctgagagacagattccctgaagcctttcatttattcaacgtctttaagagaaagccacagaaaagctagatctagttttccctcaaatgtggtcaaatgcaaatattttattggtgtacaaaggaacacatcaccaaaatcagtattttgagctttcagtagaggctagctaattttctgataatacttcatccatctggagctgtaccacttagcagaaaaaaagtaaaaaatcctgaagaagtcaaaaaaaaaatgttaatgcaatatagtggttgcctagggctagaaggaaatagggaatgtctgctactgggtaccaggttctttttggggtgaagaaaatattctaaaatggtg

SEQ ID NO: 482972 - DNA, 1000 bp, Homo Sapiens; identical to SEQ ID NO: 309372

SEQ ID NO: 482973 - DNA, 766 bp, Homo Sapiens
  misc_feature (518)..(518): n is a, c, g, or t
  misc_feature (551)..(551): n is a, c, g, or t
  misc_feature (580)..(580): n is a, c, g, or t
tttaatgtggacactcaaggcctgggcagagtggggagcgcccaggagttgggtgggcaggcaagtgggtgggttgcaggcccactcttggccccaggagggcatgccaggtggtgggggctggcccaggtaggccaaggggaggcccaggcaggaagggtggcccaggcaggcagacccaccaggggtccctgaaggccagcccttgagaaggtgtctaagccagggggtgagtgcccaggccagagcctagcccagggaggcagggttgggtcccggttgggggctcttggagcctaggggctggcatcactgggggcctccccgagctgctgctggaactccaggcgtgtctgccggttggactccagcagctcctggaggcgggcgtggaggtggtcattcttctcctccaggtggtccaaacaggagttgatctggtccaccatggagttgatggcagcgtattctgggaggaaggcgaaagacagagcccagatcctgtgtctccttggggntaatggacaccctccttccactgtttcccagcntgcttcccaaagggctttgtgcaagtccntactgcttcctgagcctcagtgtcaccgtctggaaaatgggtggaataccaaaagaggagtggctttgaatgaatgacactttagtactgcatccttttttctagggttagggtggtcatagggtggcgagccagtgtcctacatgggaagtcctgccagatgccaagtctctgcacttcctgcag

SEQ ID NO: 482974 - DNA, 1000 bp, Homo Sapiens
acacactaagtgctcaaaaagatgtctgctgctgtcagtctctccattatcatcaccatcatctgacttttcctttgcacacttacatagtttcccacctccgtgcctttactgatgctgttccctttcccttcctccacactggtccaaatttcagtcaggctttgcatattttaactgccactctctagtcatcatgcataattacatagtcatgcagaaggcagttgacagtaatcagttgtggcatgcattagtgcccacagatgccagcccagtgtctggcctccgggaggtgggatgaggtctgtcctgggctgggaatccagcaccaagcccgcctcccacaccctccccccagcacctgcttgcagagttcctcctcaacctcgatctcttcttcatcctcatcatcctcttcctcttcttcatcaccctcgaagcaacccacagcgtccactgtaatgaagtggtcctcatcttggccagcaatttctttctcaagcgacttcagctgcccagggagtaggcaaggagctcaggtcagctctgaacagccagggggccatgcccctacccaccccacccctcccctgagagtcccaatccctccagacccgctgtgagtttgggctgggataaacctcaacttgctacacagccttggccaaggctctgtacctctctgggcccatgtcctctgagggagctcaggttacctccttggctttgtccttatgcccctgggacttcacgtgctccacaaacttgagaggggttttgaagtagcggttgcaaacggtgcagaagggtcgcaaggattgtttggcaatctggaaaaaggcaggccaaccaagcagtgtccccagctgcaagccccctgactagcacccaggcagggcccagcaagagctcacctcccccgggcaggcccaccatatctgtaacaagccgggctgtgctccacccctgcactggaacgtgggcaaacacatctctt

SEQ ID NO: 482975 - DNA, 1000 bp, Homo Sapiens; identical to SEQ ID NO: 309374

SEQ ID NO: 482976 - DNA, 1000 bp, Homo Sapiens; identical to SEQ ID NO: 309375

SEQ ID NO: 482977 - DNA, 1000 bp, Homo Sapiens; identical to SEQ ID NO: 120071
  misc_feature (918)..(918): n is a, c, g, or t

SEQ ID NO: 482978 - DNA, 524 bp, Homo Sapiens
cattgtcccttggccccagatgtcaaaagcatctccgtttgcagatagcggacgatctgtggtacagtaatacacggcggtgtcctcaatttccaggctgttcatttgcagaaacagcgtgtttattgaatcttctcttgagatggtgaatctgcctttcacgggtgcagcgtagtctgttgtctcaccttcagttttggttttaatacggccaacccactccagccccttccctggagcctggcggacccagctcatccagatgttactgaaagtgaatccagaggctgcacaggagagtctaagggattccccaggctttaccaggcctcccccagactcccccaactgcacctcacactggacacctgcaaacacagagacactaagatcagaaactgccacacatatccactgtttctctctctcacgtccactcacacttaatctctctagttctccataaatcaccttttaaaatagcaacaaggaaaatccagctcagcccaaactccatggtgagt

SEQ ID NO: 482979 - DNA, 1000 bp, Homo Sapiens
tcacttgtaggaaggtttgaggactatttatttacttattaatttattttaacaccactgtctgtttaaagcaactttaaggcagctcaaaaagaatgctgggggtaaaggattcttcctgggcattttgactccatcctattaacgcaggcatccctgagacccacatagtgctaatttgcttactaccagcagacctacactatttctgaacaacagaaaaagcaagaccagcaactgaagtagtcagtgaccaaactttaaagttcttagagaaagagggagacaatgcactacttttccctactgattgaaaattagtaagagttaatagggagaggtggttgagtgagcatctcctgatttttaaaacatggtacaaaggatcctgcatccaagatagctaggcaggtgagcgtacctcatgtaggtgtgtttagagctcaggcaggatgaagcaggatgaggaggacttatctcatgaaattacaaggtgacttagactgggctggggtgggcagggataggagctcatgctgaatctggtccaaacatcttagaaatgaggagtctcccctccttgcaaaagcaggctgtttggggccccagtaattttatttgcagatgctctgaaaagcactagtcaactacgttttatgtatttcacaattcttccctccatatacagatgatccttcacttacgatgggggtcacataccaataaacccatcttaagttgaaaatgcatttaatacacctaacctagcaaacatcatagcttagcctagcctactttaaatgtgcttagaacgcttatattagcttacagttggacaaaatcatgtactacaaagcaaattttgtaattaaaaagtgttgaatagctcatgtcatttattgaatagtgtactggaaataaaaagcaaaatggttgtatggtaaagtatgagttctactaaatgcctattgcttctgtaccactgtaaagcccccgaaaa

SEQ ID NO: 482980 - DNA, 1000 bp, Homo Sapiens; identical to SEQ ID NO: 309381

SEQ ID NO: 482981 - DNA, 1000 bp, Homo Sapiens; identical to SEQ ID NO: 309382

SEQ ID NO: 482982 - DNA, 1000 bp, Homo Sapiens
catctgaaggttgatgacatcattataaatgtttacattttttcctcagaagcacataaaatggtgattcttatcttcaatggcatcttatattcaatgaaacatggtagtgggcaggtttgtcatttcacctgatctttcagctacgttggccaactgacctcaatcttctggaaatttcttcttctcctggcttccacagacacccttctcccctggtttttctgccacattttcctcctgtctcctttgctgtttcaaatgatgggtgtcacgtagccttccagatcattttttttttttttttgagatggagtcttgctccgtcgcccaggctggaatgcagtggcacgatctcggctcactgcaccctctgcctcccaggttcaagcaattctcctgcctcagcctcccaagtaggtgggattacaggcgcacaccaccatgcccagctaatttttgtatttttttagtagagactgggtttcaccatgttgaccagactggtcttgaactcctgactatgtgatccgcccacctcagcctcccaaagtgctggaattacagacgtgagccaccgcacccagcctggatcatttctctgtgcactctgggggtgatggcacttagccccacagtggcagctatgatgaccgctcctcatgcccacacctctgctcagtggtcgactcaacctgcctgcagacttcacatttctacttggatgtctaaaaggcctgtctagccaacatgtctgaaatgaaactcctggctttccctactaaacttcaacctatttccccagccacagacctggtcatccagggtttttcctttttgccctacccctacatcttactcatcactacatcttgtctaatctacctgcaaaatacacctatgtccactttcccccatctccatcacccaagtctccactcttccgtcctttctcctctcagtatgatttggtggccagccagctctccaagaccactgg

SEQ ID NO: 482983 - DNA, 1000 bp, Homo Sapiens; identical to SEQ ID NO: 309383

SEQ ID NO: 482984 - DNA, 1000 bp, Homo Sapiens; identical to SEQ ID NO: 120072

SEQ ID NO: 482985 - DNA, 1000 bp, Homo Sapiens; identical to SEQ ID NO: 120073

SEQ ID NO: 482986 - DNA, 1000 bp, Homo Sapiens; identical to SEQ ID NO: 309387

SEQ ID NO: 482987 - DNA, 1000 bp, Homo Sapiens; identical to SEQ ID NO: 120074

SEQ ID NO: 482988 - DNA, 1000 bp, Homo Sapiens
aaaaaaaaaaaaaaaaaagacttatttgttgttgctaaaatgcaaagattctgggcttatgaagaaactaatactccagtaggaatgcttgaaataaaaatatctaccactaactgaaacctaagtatcaggttgcccatcttgtgttgctgtaatataatacgcagactgagtaatttataaagcaaagcagcctatttcatggttctggaggataagaagtctaatatcaagatcccggcatttggtgagtctttttgctgtatcatctcttggtaaaggcaagtgggtgagtgagggcaagaggttgaacttgcctcaacctcaagcccttttataatcagtattaatccattcataaagttggaacctccatggccagccagccattaggattcacttcccgatatggttgcattgtggattcagtttccaacacatgctttttggaggacacattcaaaccacagtacaggtactttatattagctttataatgactctcccaagaaaacagtgccacgtacaagatgaggaactggagctcagacaggtgaagccccaccgcgtgtcacacaggaagaaatggcaaagtaaaaattcacacccaggactccctgggctttctcaccgcacatgttgccttcttactggatatcacctgacagaatgagactcaggtgattacagggattcaccaggaaaacgggaaagtcggcatgaccagaactagaacatgggccagtgaatgcagttctgggtggaccatggcattggaagccaaaggatagcttgaatgtggttaaaaaattaaaacaacaaggcacaaaacgcacaaatgaaatacaaatgatgctcaaacacagcttttattttacttcaaagtttacctcagatcagcctgggaaggtgaggggaatgaagcagatgctgttaaagggtcatgggagagaaaaggtatctgtgggaagagaataatctcttttgacttcgtgtgctg

SEQ ID NO: 482989 - DNA, 1000 bp, Homo Sapiens
ttatttaacatcgtttaataaaaaagtagtagtgcaaacaggaaagtagcataaaaatatagtgttgttgtggaaggctggtgcttgctgctgagaagctgaagccagaggaggccaggtgtgaggaaggaggattctttaaaggcaagaagagagaggcctgcctttaagagccaagagagccgctcatccatgaccccaacacagagctctgtagaactgctgtcacacgccaaacaccaacataagggggtgagagaatgaactccagccgcttctcccaacacaacccaacagagctattctgggacatgtgtgtttgcgagcttgtgtgtggagagcaccaaaaagctcatcagcagccccaggcctctgtgcggtctggttttcagactggcacccgcaggcagtgcatctgaagcaccttctagttactatccccatctggaatcttggttttctccattccatgtcaccttctattgccaacccaagggtgccagtgcctgtgggtctcattatatgatactctcttccaggactgaatccgctagtctggccaaaaaaaaagcactcagccacatcctactccccaataaatgtctctggggtcttcattttctcttccggctgatcctcagttcatccagttccttctccattaagtgggattcagcagtggactctgaaagctgaaagtgaagcagcggctgttagcaagcagcacatttctaggaaatgtttcgggttagcaaggccggccctacacacggaggaaaggccccctgccacttctctgatgctgctggcttcctcgatgggaaaccctctgtaactgggtagaatgcaacccctgatgacccaggaccacaagtacttgaagaatattcacagtccactctgtcagcacgctgtcacccacgagggcatggcactccctgcacgaaggagagcaggtctcagaggacgtcaaaggcagatactggtgattgtaaggcta

SEQ ID NO: 482990 - DNA, 371 bp, Homo Sapiens
ccaccaagtaagcaaactcacccactgggtggggaatagtcctgcaagaaaaagtcttggcaggagggacaaaggtcagccagagggtcactccaccatcctcacagtctcaacaagaatagggaacacaagagaaaactgccctactggcccttgctttccctatctgcggcctccggaatccggtgtggaagaagtgttcagaaactgtgctgaggcccttccctattcccccacgccatccaccttaccccagtggcaactttctggccggacaggtcaggagcccagctaaaaaggtgagtgggccatcagcctatacaggcaacgagagtgtcaaccgccagattactactgccagttacgaaaaa

SEQ ID NO: 482991 - DNA, 1000 bp, Homo Sapiens; identical to SEQ ID NO: 309390

SEQ ID NO: 482992 - DNA, 1000 bp, Homo Sapiens; identical to SEQ ID NO: 309391

SEQ ID NO: 482993 - DNA, 1000 bp, Homo Sapiens
ttttaggtcgattatctaaggtctcatgctactttaagactacttttggctgtcacctaaaatcaattttttcagtgctacatagtatacctatgacatcctagaaacttgattcttccctgtggtcaaatgtttaatatttttcagccaaaaaaaaaatgccttttggaaaaactaaagcctgaatatgtgcacattttagcagcagcaaagggttaaataataaataagaatactactttttggaattaaatgcagtttctgtttagaaaggaaaataaaacaagaaaataaatgaagaggacattctgagctttatcataaatcaactattttacattgcttctgtcccctccccctaaaatatatcttaattccaaatattagacttagattttccttaatgcacatcagcaggagggcattgccatgtactccaacttggaccacagaaaggcaagacatcgtcacaataagtcatgcgcttctagctcataacagctgtcactcaccagtgacacacttttatttttcatagagaatgtgcatcagagcaaaataaagtttgaatagtaaattttaaaattagttcaataaatcccaacacatgtttaaaccgtcactttgcacttctcaacacaactggctagaaagtgtcatatgtagatgagaatttgttataaattccttttttcttaaatattgctttaagaatttggctcttttctccttagtatatagtaagaaatagtctcgcttgcccaagggcaagttccaaaattattgctactaaagaaatacgtattcttatgcttttcagcataaaatgttataaaagccttgtaaaagatattctatatagtaatatcccctctaaaaaaattgagcgcttgtggagaccattttaaaaaacaaaacacagtcaacaagtataatactttccccctcattgtcattattgataacgatttattagtttcattttgcaagttttactaag

SEQ ID NO: 482994 - DNA, 1000 bp, Homo Sapiens; identical to SEQ ID NO: 309392

SEQ ID NO: 482995 - DNA, 1000 bp, Homo Sapiens; identical to SEQ ID NO: 309393

SEQ ID NO: 482996 - DNA, 1000 bp, Homo Sapiens; identical to SEQ ID NO: 120075

SEQ ID NO: 482997 - DNA, 1000 bp, Homo Sapiens
gtttggctgattaaaagttaaaccttaaaagagacaggaacttgtgaattgtggtctgtgctgtgagatttgggggtggggggccagagggaaggtttcagcccatatcccattctcagcttttggcttcctaggggaggtagcagtggtcacagtgcgccccttttgaggggcttatctatctccgaggacacatagaagctgtctaaactaaacttagtagtggctgggggagatggtggaccttaatactgggtactacatctcccaggcgctttatcactggagcctgtttggcgcatgcgcttggcggtatggcactgtctggaagttacttcctgctgctgtgctcccattgggcccgcctacacagtcatccgcatctgttgattcacgtgctcagcacccaggtctcttactggtcggtagagcttccgggacgcccccttttttgaaagagtcaactgattagttggtgatggggagaggcgggccttgggaaccgtctcctggttggggggtgggggggaaagatggcggagctgatgctgctcagcgagattgctgacccgacgcgtttcttcaccgacaacctgcttagcccggaggactggggtctgcagagtgaggcaccggggaggggagagggctgtggcaaactgtccctgaggcacgcgggaaagaagcgggggcctaaagaggaagtctgggcaaatacggaatccgccatctgaaggagagcggagcagggggctcgttgtgcattaagggggatacaaaagtcagggaagaactctgctccctgctggaacgtcgagttgttccggggtcggggaaggaggggctgaagcgccctggttgtatcacttttcaagtgggcgggcggtgggtctggccgagcggagccaatgagggatggggcgggggcttgtgtgcgatctgtaggctggggccaccgaacgaccccccgacgctcagcatttcttgcagacagcacctt

SEQ ID NO: 482998 - DNA, 1000 bp, Homo Sapiens
tctagattccaataagcctctcttgcatttcttttaagtcctcaccagcagcctctgcaagcccttttggcttccactcaccatctggtcccaaagccaatgttacatttttaggttgtatgtgtgtgagtgtgtgtgtgtgtgtgttttaatatggcgacatcacactcctggtatcacaacttattccagttatctactgcttcataaaaaactacctaaacttagtggcctaaaacaacaatgatttgttttgctcatgaatttgcgatttgggtgaggtccagtgaggatgcgtctctgctgctcctgtggcgtcagttagggcattttctcactcctgtcctaacggaactccagtctgagcatgttttagtccttctcacccactttttcacatcttttagcctttctttctttgtttctgtgctgcactctagatcatttcttgatattccaatttacctattttccctcttggatttaatcttcatttaaacccacccattcagggtgtgtgtgtgtgtgtgtgtgtgtgtgtgtatgtatgtgtgtatgtgtgtgttttgagacagagtctcagctcaccgcaacctccgcctcctgggttcaagcaattctcttgcctcaacctccctggtagctgggactatgcctggctgatttcttttctttttcttttttttgagacagagtcactctgtcgcccaggctggagtgcagtggcaccatactggctcactgcaacctccgcctcccaggttcaagagattcgcatgcctcagcctccagagtagctcccctaatggactgttttccttgctgcctcctgcaaagtttcgttttaaaagatccaacacctgtgcatcattctgaacttcctgcgcatcgaacaatgcctgtgctgtctcttgctctgcctgttcacaaatggataattgtgtgtcaataaaatctaccatatccgaccctgtatctgttgcggtttcatcctcatcat

SEQ ID NO: 482999 - DNA, 1000 bp, Homo Sapiens; identical to SEQ ID NO: 120076

SEQ ID NO: 483000 - DNA, 1000 bp, Homo Sapiens; identical to SEQ ID NO: 309396

SEQ ID NO: 483001 - DNA, 1000 bp, Homo Sapiens; identical to SEQ ID NO: 309398

SEQ ID NO: 483002 - DNA, 1000 bp, Homo Sapiens; identical to SEQ ID NO: 309399

SEQ ID NO: 483003 - DNA, 1000 bp, Homo Sapiens; identical to SEQ ID NO: 309400

SEQ ID NO: 483004 - DNA, 1000 bp, Homo Sapiens; identical to SEQ ID NO: 309401

SEQ ID NO: 483005 - DNA, 1000 bp, Homo Sapiens; identical to SEQ ID NO: 309402

SEQ ID NO: 483006 - DNA, 1000 bp, Homo Sapiens
  misc_feature (212)..(212): n is a, c, g, or t
  misc_feature (526)..(526): n is a, c, g, or t
  misc_feature (560)..(560): n is a, c, g, or t
  misc_feature (573)..(573): n is a, c, g, or t
  misc_feature (667)..(667): n is a, c, g, or t
tttttttttaaaaaaaaaaatcattgattaaatcatcctactaggatattgattgtaatgctaaacaaacaaaaagtcacacagttgaacagtgaaggcaagtatcttagaaagagtcaaatatacttgtagcatgaagaagaataagactgttgcaatacctctatcaaatacttttctccattccaaaaaaaaccctgacattaaaaaancaataataaagtaggtcacaaaaagattggaagtaccacctttcttcagatatgatttctcagtatagccggctacaagttttcatcaaatgcaagcatggtgacacaatcaaggaaacattcccattttggaatctttttggaagcttcagaaaacattaacactttcaaaatggtaaagtttctttaccaaaaaacttctcctgaagaaacctcagtattctgtaggcagacagtacaccttactgccagacaacacatctgatattggggcactggtaaagacagaagctctccatgtcatggtcacccantgctctcttcatcagtatgcgctagggtgcaagnctgtcatcaatcntgaaagaaatcttatctcttgttgtgaaagtattctactgtttcaagtgccaacccttgaataattccctgtgtaagatgatttgtcatgaaanatccactattgtgaaagctgccagattcatgaaagccaagactttcaatcaagagcttctcgagaggttttgtcaagaaatgggagcactatgaagttctttgctatatataagttccctgctttcagaagacaaattctacagcctgatactgctgtttacaggataacatacactctttttaaacagtttaactcttcaaccttgaaagtaaaatgtggagtcataatcttttctttcctaacacagcattaatgatacagatcttgccaaaaatgatctcagtaacttgaaggcaaagaaaatgatgaaacatgaatttatctgaagagc

SEQ ID NO: 483007 - DNA, 1000 bp, Homo Sapiens
  misc_feature (57)..(57): n is a, c, g, or t
  misc_feature (71)..(71): n is a, c, g, or t
  misc_feature (104)..(104): n is a, c, g, or t
  misc_feature (188)..(188): n is a, c, g, or t
  misc_feature (672)..(672): n is a, c, g, or t
ggcttcctgggctcaagtgatccctcccatctcagcctcccaaagtgcctgggattncaggtgtgagcttnctgcagtggcatcttgctacatttaatacttcncattactccattcttttctttggagcagactgaagcattcctttttttcttctttttctttttcttttttttttttttttgagncagagtctcactctattgcctaggatggagtgcagtggcacgatcacagctcactgcagcctcgacctcccaggctcaagtgattctcccaactctcagcctcccaagtagctggaactacaggcatgcgccacaaagcccacctaattttggtattttctgtaaagagagggttttgtcatgttgtgcaggctggtcttgaacttgggctccagtgatcctcctgtgtcagccttccaaggtgctgggattacaggcatgcacccctggcctctgaagcattccttgagtcagatatgcttggtgttgtttactcaacctgagtcaccttttgcttccctgttcaccattacctactgccttaccctgaaaggggaggtacttactatatatactcagatcataaattcctcaggaagctatcatgaggttaaaagtacagtttctggaaccagattgtttgttttcaaattttgctctgccncttaccagttgtgagatctttggcaagttacttaatctctatgtacccatgtcctcatccgtaaaatggggatgataacagtagccacctcattgggtttttaatttttttttttttttttttagatagagtctcactctgttgctcaggctggagtgtggtggcacgatctcggcacactgcaacatccacctaccaggttcaagtgattttcctgtctcagcctcttgagtagctaggattacaggcacctgccaccatgcttggttaatttttgtatttttagtagagatgaggtttcaccatgttggccagggtgatctcgaac

SEQ ID NO: 483008 - DNA, 1000 bp, Homo Sapiens; identical to SEQ ID NO: 309404

SEQ ID NO: 483009 - DNA, 584 bp, Homo Sapiens
cccaaggggcctcccctcacctctccccccaccccgcccgcccttcccccacctcgctcctccctccatccgcccctcccctccccgccccaccccggccctgccccgtcccaccgcccgcactcacgtcgtccatgagcaggagcaggatgttggggggctgcggggcgcccgaggcccccatccccgcggcgctgagcaccagcaacagctgccaccacctcgtcgccgcgacaaccgccgccatggcaaccacgggagccgcggagccccggccagcgagccgacctagcgagcgtccgccggcccttccggctgggctgcggggcggggcctggacggccacgtgactcgcggggcggggccagagtccgcggagggacgggaggcggggcctggactgcctcgtgaccagtggggcggggcctgagccagctgtgtgcggatggggcggggctttggaggccgcgtgaccagcggcgggtcacgtgacgcggtgcctggcgccgagcctcccaagatggcggtgtgcatcgcggtgattgccaaggaggtgcgtacgcgcggcgtggggcgtccgggct

SEQ ID NO: 483010 - DNA, 1000 bp, Homo Sapiens; identical to SEQ ID NO: 309405

SEQ ID NO: 483011 - DNA, 1000 bp, Homo Sapiens
gaggcaggacaggtggtgtgcaatagtattggtgagctggaacctggctcccccttctgctgtccatatcacccacagcaccctgctcgaccgtctcatcgaacagctttctggtggtggcagtgcccagtcgttcccacttgagtctttgagttccttcaagatggagatggctccttctctttcttccctcttgcctacagtgctcaatactgcatatacagcaagtgctcaatatgtgcttattggattcttctttggcacagacctccttgtccatcagtgaggggagccataaaatcctggtctccaggttgttatcagggacccctcagggcttaacctttattaatgcaagaaattgtccttcaaagttctagctgaatagattaaagaaacccagggcaacaactcacttgtgcactcagccattgcaccaaagctggatggcagttctcctggagatctaagttgtcttgctggggcagggacggagaacacacgggagggaagctcagtcactcctctccctgcccccaggcctcctccactcctgggaaggagcaggctggctcaggtgtggcagcaaataagaacagtaatgctgttgtgattttggagtccttggctgtgcgtgagttcaccccatcctcacagccatgctccctgcaaaattgggcagggcaggaattagtctccggtgttttaccggagacatcaactcatttcccaaggtcgtgcatagatgtctccttggcattcctgggcccatgctgaaaagcaactgtccctcaatccttacacaaattcacagcagccctgctggcgtttgctcactgtctgctccctgcccagtcctgcagtttgtgaatctggcgttccacggagatggaggtccgcagtgtgcccatggagttctccatctgaatgggttctgacctgcagccccctttctggcacactccctggtacacctcccaagacttctttcggaagcgct

SEQ ID NO: 483012 - DNA, 1000 bp, Homo Sapiens
ggtgaaaacccttttaagatgaataagatattttactgagcatgcaaggatttaatccattttaacaaagctggaactaacgctgcttgatgctcaactgagggcctaggagcatgttatgcattaaatcctctctccgttgcctgaaggactaaaatacaaagaaactacactaactggcatagttattagaaggtttgctaaaccaaagtatctttgaaaataaccttctctccagatgagagatgatctctaatacacacatggacactcaccagtgactcccaagggacggatggtgtactcattgattgtgaaacccttttctagggcatgagccctcatattcttattgaaaatatcactcccagtgaaatagagaacaccacagtaatactgatctttgggtatcaacctaaaaaaaatggacagtagatacatttttttaccatgcatttcaagtttagcaaatataggactcctaaaatcaataaggaacaaaataccaaagataagcctaagtggtctaataatttgaagagaagactatcatgaggtagactgctcaaatcaccccaaccttgtaatttgtttaggtttctgtgaactttgttctgaaagagatgtggagaaatgaaattgcattatcacctattacaactaacttagcccaggcaggaaatgacttttgagctgtggaaggcatcatggtgaggtgcaaatctagagaaaataaattggagtctgtagacagtcattattctttacatactttggatctaacattgcatttggcaagaacatatggctcttgggagtaaaaaaaggctctagatatgaatgtgaactccaagatacaaacagggagggagaaaacgagacaagtttggaaaagttaacaggtcagcaacaaagtctgaacaatacctgatatcaattcttctgtgtggatattctttttcatcatttttactgggaagctggcaaacaccctaaaatg

SEQ ID NO: 483013 - DNA, 1000 bp, Homo Sapiens; identical to SEQ ID NO: 309408

SEQ ID NO: 483014 - DNA, 1000 bp, Homo Sapiens; identical to SEQ ID NO: 309411
  misc_feature (61)..(61): n is a, c, g, or t
  misc_feature (265)..(265): n is a, c, g, or t
  misc_feature (752)..(752): n is a, c, g, or t

SEQ ID NO: 483015 - DNA, 1000 bp, Homo Sapiens; identical to SEQ ID NO: 309412

SEQ ID NO: 483016 - DNA, 1000 bp, Homo Sapiens; identical to SEQ ID NO: 309413

SEQ ID NO: 483017 - DNA, 1000 bp, Homo Sapiens
tctagactaattgattttatagcttcacaactgaattttgtaatgtagccacaggtccatacacagcagaagcttagattaatcctttccaaaataaaaggaaaaaatccatgtgagtcacttctaaatgcctgtgtattgcaaatgaatgatgtttgggtgtgcatttatactacttgtctaagataagacctatttaacaagatatagtttatacctcattaaagcaacatctacttctcttgcttggttactggtctttcacagccagtccaattggccaatataaaatacacttccattctgaaacctaagttccacaagagaaagaacatttttctttttaagtagatgtattcattatctttaagagtttatattatatacatgacattacccccatttaatttttgtgctggtcagggattattcagtgatgaaaaaagttttcccaaatgagggcaaataaaaacatttttgctggaagactataaaggacaacttcatagacattcaaaagtgaaaaataaaatacacccagacctcttataaatatattgggaactggaaaatcagaaactgagatcatctctcttaattcacatgatttctcatctccttctcactagtacactttacctcctgatttctggtccaatccattgaacccatttttttcactcaatgtgagtaaatgtcatataaaaggttgcaggaagatgctgcttcaggccattttctctcgtgatgtcagcactcaaaaagctttggattttagggcattttggattttggactttcagatttgggatgctcaacatgtattaaccgtgggtttttcgtatatgcactttatcaagctgagaaagttcccttccattcctagttttttataaacaatattttagtcttgcattgtgtgaaatgtttcccttttctattgagatgatcatgtgagatgatcatgttttgttctttattgtattgatatgatgtatta

SEQ ID NO: 483018 - DNA, 170 bp, Homo Sapiens
ctgagaatgcaatgggagcagggtcctgtcccacgctaaagaagctcacagcttaatgcaaatgagaagccagtgaggcacatcactactcctgctgtgcacttgggaactagaaacacaaaacctgactctggagggaagctaaggaagcattctactcttgagttcac

SEQ ID NO: 483019 - DNA, 1000 bp, Homo Sapiens; identical to SEQ ID NO: 309414

SEQ ID NO: 483020 - DNA, 1000 bp, Homo Sapiens; identical to SEQ ID NO: 120078

SEQ ID NO: 483021 - DNA, 1000 bp, Homo Sapiens
tttttccttaaccaaagagccaggttttaatgacaagtcagttgccagcaatggacgtgcaggtaactatcgaagaagtcgcaactacaaatcccaaactgcttctatcaatggaaaagccctttgttgagtcacaagcctgaaacgaggcgttggcacatagtcagtgaggatggtctttgacttaggagggaagtgcctctgagtacatgaggatcacagtcttctcatctcgttggttttctatttcattggtagcatcttctttatcataatccatccaactgtttacaaagaatggtaaaatttggaactcaggtggcactgcagctttctgccagaaataaaccagtttctataattcagtaatagctgtagaaggccaatatattcccagagaaaaatgaaatcaagaattatattgaaaacagagaccattaagtgctctaaatatgtttcattaattattttactcatttttctgaaaatcttgccttatcaataaaaaacagtcacttctctccttataattgcatcttatcatagatatagtggaaataaaataatggaaataaaacctgccagtttctccaatgtatactacaacagcaaaattattttttattcatgatttatactactgcaggatggcaagcaggggggaagttaatgggggaaggggatggtgggaacaaaatgccagaaccaaaccacagatacttgaacaacacctactccaaaagcaaaacaatgaataaaggagaaggagaggagaggaaaaaagagaagagaaaagggaggggaggggagaagggagggcactcaaataattaatgctacaggtctcagaccttttagaatctttaaaagaaacaaattattgctatcaacacgcacatttcattttcctttctcgttttttacaatagtctctacttatttgaaaaaacaaaacaaaactaaactaaagtaactcaacatctcaaatgatctataaatt

SEQ ID NO: 483022 - DNA, 1000 bp, Homo Sapiens
  misc_feature (19)..(19): n is a, c, g, or t
  misc_feature (41)..(41): n is a, c, g, or t
  misc_feature (97)..(97): n is a, c, g, or t
ctcataaacttttacaaantagctttaaaggaaaaaggggnagaaaccaagttgtattaaatttttaatggttgggcttaaaaaaaattacttcttnaacctccttaatttggccagtttgtggaaggtgaatctcaatggcatcaaaagtatagtcttcttacacttgttaaaaataaagtgtttaaccaagtttgtttccattcacaaactttactcccaactacaaaaaaaaaagaaagaaaaaaaaccagaatccatcctccttcctcattgtctcctaatggagagcagcaatcctttccatccagaccattgtcacacaaccgtctccacgcccatcagctttggtgtaaggattctcggtgtcacaccgttgtttaggtcttcctcgaactctagcaactgccccatgaagttaaggtttggggagataattggtcgtttgcctttgacaaatttataagcatcagtcatggtcatccgagtgtgcttcatcaagtaagcgatgacgatggtggcggagcgggacaccccagcctggcagtggatgagaagccccttcccacactggtgagcttcctcaatgaactcaaaagcctcttcaaagtactgccgcaggttctgcttgttgctgtcagtggctggcagccgcttgtagttgaacaggcctttctcatagtggtagaggggaagatgagtggtgacgttgatgacgtagccgatgttcagccgctgcatggtgtccaggtcctgagcatcctgctcattgccaaggaacaggaagggcaagatgggggtgagctcagcgttctcgatgtcaggggtggtggggatgggctgaggtagcaagctcgaggccgcggatgcgccgccccccacctcccggcactcttggagctggagggagttgtcacagaggttttcatggttctgcttaaaactactaagtccacctttcaacaccagaggttctttgccttctctcttcagggactcg

SEQ ID NO: 483023 - DNA, 1000 bp, Homo Sapiens; identical to SEQ ID NO: 480721

SEQ ID NO: 483024 - DNA, 1000 bp, Homo Sapiens; identical to SEQ ID NO: 309417

SEQ ID NO: 483025 - DNA, 1000 bp, Homo Sapiens
ggcatccagtttctattcacaaagaaaaagctccagtccatcttttaatttttttgaaaaattcctgacattacagaactaaactgaaatgtattaatattccactcttacatttccatgacaaacagaaaaattcatgagccaaaaaaaaaaaaccaaaaaaaaaaaaaaccagggagaagcttataaaactaaatatggatctcagcatcaacagctgaacagagaaaggaattaaaacgctttaattaaaaaatcacgagtggatgataaagtgtgtagaaactgaaaatttacaaactatttaaaacctggaatcgctgactgttcagaaactacacagatggatcatgggtggtggtgaacagcagaaagggattatggatgaatctgcattgttctagctgctccccatgccacccgtctccgaggaaagcctgacattgattagatattgagccaggctaatgctggcagcagatccagtgatggtaacctgcctatcagtagatccttccactgggttcgcaattttgatctgcgccccagacatctgacggatctcattgattttggcgccttgacgcccgattatgcagccaatcaaatcgtttggaatggtgagttcatgagaagtagtctgagcagatgcatccaaacctgcccaatagcctttcacctctggagagctggattcaatgccactgaatccggtgttgccatgcgtcatgggaaaatgagactgttgcattgccaactggtgcagcttggtcaaatctggctgtggaatggcatactgtccttgaatggtataggcctgaccacctgcaaagatgaccggagagctggacggcttgggccggtacgggatggtcacgcccttcgggggggactccaacatgaccacgcagatctgtttgacacactcaatgatggattgtggaatgccagcaatagtgatggcccgctcagttgagttgggtagcatatcccctgccac

SEQ ID NO: 483026 - DNA, 469 bp, Homo Sapiens
  misc_feature (21)..(21): n is a, c, g, or t
tgtggcggggccgcagcaggnactcgagccgggctctggccagcgcgccctgcatctcccccatgggcagcgggcggcggggcgcgcggcagacgagagcgaccggcgagcactgacgtttccttgaaggagccgccgtgactcaggccgggcaagatttcctgccccgagtcccaaaacaaacaaatggcccttgtgcacggtcgggtcgcttccgaaaacgccttttttgtgcttttggccaaaaccaagcaaggctgaaaaatcccagaacttggaagaggaggaaggaaggaaagaaagagggaaaagggggagggagaggtcaggaatgtggaggggagggggcggaaataaaagtcgtctctgcactaaaggaagaagtacaatctgcatttcactttttttttctgaagtaatctctgagaacattttgtccgttccgcatgtaatttttttccttgcattt

SEQ ID NO: 483027 - DNA, 1000 bp, Homo Sapiens; identical to SEQ ID NO: 309423

SEQ ID NO: 483028 - DNA, 796 bp, Homo Sapiens
aatgctcttctttcccagtttatctgcatctcattactggcccatgagaataagcagcccaatcatcggtttcgtctgggaacacaaagacataaaatcaacttaggtgctcatcagtgttggattggataaagaaaatgtggtgtatacagacaatggaacactatggagtcaaaaaaagaacaaaatgatgtcctttgcagcaacatggatgtagctggtggccataattctaagtgaatttactcagaaacagaagaccaagtgttgcagtttctcccttataagtgggagctaaacactgagtacatatggacataaatgtgagctagatgtgagaggaaaggaggtggggcatgagctaaaaactacttattgtggggtactatgttcacctcctgggagtattaaacccaagtgacaaatctgcacataaaccctctgtctttaaaatagaagatgtattttacaaataaagaaagggccaggcgcaggtggatcacgaagtcaggagattgagaccatactggctaacacagttaaaccccgtctctactaaaaatacaaaaaattagctggaagtggtggcgggcacctgtagtcccagctactcaggaggctgaggcaggagaatggcctgaacccaggaggtggagcttgcagtgagccgagattgtgccactgcactccagccggggtgacagagcaagactctatctcaagaaagaaaatgaacaaaaacgaacacttcttaatttcaaaatttaatacaatactatagcaatcaaaatagtgt

SEQ ID NO: 483029 - DNA, 1000 bp, Homo Sapiens
gatcacctgagcccaggagttccagaccagcctgggcaacacagggagaccctgtctctgtaaaaagttataaaaattagccaggcatagtggtgtgcactcatagtcccagctactcgtgggactgaggtggaaagacagcttgagcctcagaggctgaggctgcagtgaactgtgttccaaccactgcactcacagaatgagaccccatctcaaaaataaatagctacttgggaggctgaagcaggaggattgctcaagcccaggaagttgaggctgcagtaagacatgattgtgcctctgcactccagcctgggaaagagagaaagcactagtctcaaaaaaaaaaaaaaaaaaaaaaaaaaaaaagctttaaactcttaacaaagattcttttctcgaccaaactctagctaagctcctccgagcccccttctcaactaggcctcaacctttgcctataaagacttgaacaaacactaacacagtttctcacagctcaaggccacatccctaagttgatcctagctcaccttaaagtgcctgcttaagaaaactcaaagctgccgaaagaattaactgtttgttccagcgaacccctgaacacagggccctgactcccagtctctgtgggagggtaagagtcttacttcaaaaagcaccagttagcaaacccagaggggtttcacatcaaccactttccgctttttgtaatttttcacattcctgactcttctaagtctaggctggccttctccctattctcccattcacgctgtgaaatgcctagtcacctttgcacaaatccaagttgagttcagttcacatgggacccttttccctattgtgatagtatattactgtttaacatctatccttaaagttctaactaatgcccagctttgtttgtctttaatactctttacataacccatttcagagtcacaacctatcaaagtaccatctgaaatggaaataaaattatgtgtttggcctctga

SEQ ID NO: 483030 - DNA, 1000 bp, Homo Sapiens
gaattctggtacgacgtaaagtcagtcgatcgacgtaaacgtacgtacggactttgatgcaaaatgggagtcagctagctgcaaaagccctttacgggagcagggtaaaggatccgtacgtttagtttaggtaaacgggaacgtacgtatcgaatatcgtatcgtacgtatcatatcggaacgtttatcgactttgaaagatcgatcagacgacgtcccgggctgggtgcaaaaggggtacgtacgtttacgtttacgtagacccgtaaatcaagtgcaggttcgatcgatcgactgcaagtcgtactgcagcacatgaagtttttagtttattaatgttcttgcgaaaaatccacagtggccacagctaacatcattgcagcacctttactccttcggctggatagttgatcgttgatcgggtagctggcgtacgtagtaatggtacgtacgtagggtacctgaacgacgtacgatcgacgtacgacttactacgaacgacgaaggacgtttggacgtacaaacaactttcaaaaatgggacggggtaacgggacgagacttagcagctcgacgaaacgaccctttcgggcaaaacgggagactttaaaatgggagtctgacgactttgactgactgcgtacgatcgaaacgtcagctgacgaacgtacgtacgtcagtcgaccacgaaacgtatcgacggcaatttacgactatcgatcgacgaagactttgcccgggtgtagacttttgggagtccccaaaacgacgggacgggtgaaacgaatgtttgcaaaacggggcaaacgttcgatcgacgtaacgacatgatcggatgcagtccagctgcaaagtccgtcgatccgatcgtacgtcggacgtttttttaccgatcgacttggccccctacgtacgtcgggacgcaaacacggggaaagcctttacgacgcgacgttttcaaaacggggacgacgaaaatgggatcgatcgatcgactgacc

SEQ ID NO: 483031 - DNA, 1000 bp, Homo Sapiens; identical to SEQ ID NO: 120079

SEQ ID NO: 483032 - DNA, 1000 bp, Homo Sapiens; identical to SEQ ID NO: 309425

SEQ ID NO: 483033 - DNA, 1000 bp, Homo Sapiens
atgtcaccatgattggtggcaccaaaagtgccgtaacagggtgggcatggtggctcacacctgtaatcctagggagggttaatcctttcagaggccaaggtgggagaatcccttgaggccaggagtttgagaccagcgtgggcaacatagtgaaaccgtgactctacaaataatttaaaaaattagccagcaatggtggcgcacgcctgtggtcccagctctcaggaggctgaggtggtgggattgcttgaacccgggagtttgaggctgcattgagtcatgattgtgccacagcagtcccgcctgggccacagagcaaaaccatcttaaaaaaaaaaaaaaaaaatggctgggcacggtggttcatgcctgtaatcccagcactttgggaggctgaggcgggaggattacctgaggtcaggagttcgagaccagcctggccaacatggtgaaaccctgtctctactaaaaatacaaaaaatcagccaggcatggtgttgcatgcctgtaatcccagctactcgggaggctgaagcaggagaatcacttgaactcgggaggtggaggttacagtgagccgagatcgtgccactgtaccccagcctgggtgacagagcgagactccatcttaaaaataaaaataaagcgccatcacgaggtgctcatcccaggcacctttgccagtcccaagctactgctgttggctgtggtcgcgttagccagcaccactcttccggggttatggcaatcagcatggtcaccatcgcggtccacgacgatcagaacgaccgctgctggatgccacttatgagaaccgacatggcccacaatcacagtgaccgaggtggcctgcctttgaaggtgggtgctgactaccccgtttctgaccccaccaggaaaaggaggtggagcagctggagcacttgagagacgaactgaagaaggtgacagagacgctgggggagcagctcaggagggagggctgacccctacctcagtc

SEQ ID NO: 483034 - DNA, 1000 bp, Homo Sapiens
cctctgaatgtcagaatcttccagccctaccacatagatgtgtggccttgagtcagtcacttaacctgagtttgcttccttgtctaggaatgggagattcattctaactccatagaattgtagcaaggattaaataaaataatgcatgtgtagtgttcatagagaaacactgaagaaatggcatgttttaagcattattatgttgtggagccactgacttttctctcagtgtaacagggaacattaataacagtgcattacagccatgatagaagattccccagtctagggggtcttcaagttgggactggcagacccttgagactctttagccagatacctgcacagaaagatgtctttccaactgtcaacaacctaagccaggccaggtgcagtggctcacgcctgtaatcctagcactttgggggctgaggagggtggatcccttgagcccaggagttcgagaccagcctgggcaacaaagagagactccaccatctctaaaaaaaattaaaaattagctggctgtgctgttgcatgcctgcagtcccagctactcaggaggctgaagtgggaggattgcttgagcccagaagatcaagtctgcagtgagctatgatcatgccattgcactccagcctgggtgacagagaaagacactgtctcaaaaaagaaaaaaaaaagaagaagaagaaacaaaaagaatctgagtcaaggggacaggccatgggaggataaaagatagaaaagatggggccgagagtggtggctcacaccaataatcctagcactttgggaggccgagatgggtggattgcctgatctcaggagttcgagaccagcctgggcaacacggtgatacctgtctctaccaaaatacaaaacaaattagctgggtatggtggcgtgcacctgtaatcccagctacttgggaggctgaggcaggagaatcacttaaacctgggaggcagaggttacagtgagccgagattgcgccatt

SEQ ID NO: 483035 - DNA, 1000 bp, Homo Sapiens
catcgtgatgtcttatttaaggggaacgtgtgggctatttaggctttatggccctgaagtaggaaccagatgtcggatacagttcactttagctacccccaagtgttatgggcccggagcgaggagagtagcactcttgtgcgggatattgatttcacggaggatggtggtcaagggacccctatctgaggggggtcatccatggggacgagaagggatttgactgtaatgtgctatgtacggtaaatggctttatgtactatgtactgttaagggtgggtaggtttgttggtatcctagtgggtgaggggtggctttggagttgcagttgatgtgtgatagttgagggttgattgctgtacttgcttgtaagcatggggagggggttttgatgtggattgggtttttatgtactacaggtggtcaagtatttatggtaccgtacaatattcatgatggctggcagtaatgtacgaaatacatagcggttgttgatgggtgagtcaatacttgggtggtacccaaatctgcttccccatgaaagaacagagaatagtttaaattagaatcttagctttgggtgctaatggtggagttaaagactttttctctgatttgtccttggaaaaaggttttcatctccggtttacaagactggtgtattagtttatactacaaggacaggcccatttgagtattttgttttcaattagggagatagttggtattaggattaggattgttgtgaagtatagtacggatgctacttgtccaatgatggtaaaagggtagcttactggttgtcctccgattcaggttagaatgaggaggtctgcggctaggagtcaataaagtgattggcttagtgggcgaaatattatgctttgttgtttggatatatggaggatggggattattgctaggatgaggatggatagtaatagggcaaggacgcctcctagtttgttagggacggatcggagaattgtgtaggcgaata

SEQ ID NO: 483036 - DNA, 1000 bp, Homo Sapiens
catcgtgatgtcttatttaaggggaacgtgtgggctatttaggctttatggccctgaagtaggaaccagatgtcggatacagttcactttagctacccccaagtgttatgggcccggagcgaggagagtagcactcttgtgcgggatattgatttcacggaggatggtggtcaagggacccctatctgaggggggtcatccatggggacgagaagggatttgactgtaatgtgctatgtacggtaaatggccttatgtactatgtactgttaagggtgggtaggtttgttggtatcctagtgggtgaggggtggctttggagttgcagttgatgtgtgatagttgagggttgattgctgtacttgcttgtaagcatggggagggggttttgatgtggattgggtttttatgtactacaggtggtcaagtatttatggtaccgtacaatattcatggtggctggcagtaatgtacgaaatacatagcggttgttgatgggtgagtcaatacttgggtggtacccaaatctgcttccccatgaaagaacagagaatagtttaaattagaatcttagctttgggtgctaatggtggagttaaagactttttctctgatttgtccttggaaaaaggttttcatctccggtttacaagactggtgtattagtttatactacaaggacaggcccatttgagtattttgttttcaattagggagatagttggtattaggattaggattgttgtgaagtacagtacggatgctacttgtccaatgatggtaaaagggtagcttactggttgtcctccgattcaggttagaatgaggaggtctgcggctaggagtcaataaagtgattggcttagtgggcgaaatattatgctttgttgtttggatatatggaggatggggattattgctaggatgaggatggatagtaatagggcaaggacgcctcctagtttgttagggacggatcggagaattgtgtaggcgaata

SEQ ID NO: 483037 - DNA, 1000 bp, Homo Sapiens
gctttttctgaatcggaaaggctcagttgtttcaaggggcctatattctcttagcttgtctggggatgctgagcttcagttttttttttacacagctttatatgaggagtttgctcacctgctgcctaaacacctgtttcacctgtttgttcctcagggtgtagatgaaggggttgagcatcagggtcaccacggtgttaagcaatgccgccaccttgttcctgtcttccttctggtcactcttgcctgactgaatgtacatgaagatgcagctgccatagaagagagacacgacaatgatgtgggaggagcaggcggagaaggctttctgcttctctttggctgaggggatgtgcagaatggcgtggaggatgtggccatagcaagtggccgtcatagacagagtgcccagtaagctgacgttggctataacaaaacccaggagctctatcagagtcatgtctgcacaaatgagtttcaagaggggaaagttgtcacagaagaaatggttaatgatgttggggccacagaatggctgctgaaggacaagaaaacttggaataatgatgagaaggaatcctgtcatccactaacagaggactagctggacacagacccttttgctcatgatggtggcataatgcaaagggttacatacggccacgtacctgtcaaaggacatcaccgccaggaggaagaactctgtggtgcccaagaaaaaatagagcaaactttgcaggaagcagcctgggagggaatggtcttgtatcctgtgaggatgttggccagcaccttgggaaagatgaccgaggtgaaccagatctccgggacagcaaagttgcggaggaagtagtacatggtggtgtggaggcgcctgtccatgagggtgatgaccacgatgaccagattccccagcagtgtgaggaggtaggtcaggaggagccccaggaagatgagcatctgcagctcacaggtctctgagagccccagcaggacaaac

SEQ ID NO: 483038 - DNA, 1000 bp, Homo Sapiens
aaggcctctttcctatggaatttcattagattaaataaggtgttccctcctcacagcctcatccttatgagcaatcatataaataatctatttaaagtccttgaactataacttgtataatttttagttttccccctttgaaggggcctaagagaaaggtttgagaaaccagctcttgaggggggcaggggtgaggggtaagaggtcctgtgcctttcattcatcctgggagcttctcaggattgcagcatttccacctgagtgttcattcttgtacattttctcatctttctcctgggttcctaggatcttggagattacctagtccaatccttttacttcagaaacaaaaaacctgaggctcagaaaggctaagtcaaatgcctagggtcacacagggaaactgtgggagttggatccctgagtcccagtccttaaactggttgctacatgacattctagaacctctccccaccaactccctttttaaagacagggtctggttctgtcacccaggctgaagtgcagtgacatgatcttggctcactgcaacctccgcttcctgggctcaagccattctcccacctcagcctcccaagtagctgggacaacaggcacatgccactacgcccagttaatttttctaattttgttttgtagagacagatttgccatgttgcccaggctggtctcgaattactggcctcaagcgatacgcctgtttaggcatcccaaagtgctggggttaccggcaggagcaattgctccgggccagacttcccttcccccgcccacacccccccaacccggcctagatccacaggcactgtaatcacagctgacacactcgactcggaatcagcatagagagcactctgaaaattgtcaaatagggtccctgaaacttgtataccatacttctcctgaagatcttgaagcatctttgtgtttgctttttttttttttaacttaaaatatggcattcaggttttatccctct

SEQ ID NO: 483039 - DNA, 1000 bp, Homo Sapiens; identical to SEQ ID NO: 309426

SEQ ID NO: 483040 - DNA, 1000 bp, Homo Sapiens
agccctagaagtcaattgtacccgtatccccctccccgcccccgcagtaattcatgtccctgtccgtgttgtactccccccaggtttgaccccaggactcccctacccacaccagactccccagggcctgatgccctatggtcagccccggcccccgatcttgggctatggaggtaagtacaggagggagatgaaggggcttggtgagtgtgtggctttgggagaagaaaacagaggatggaattgaggacatagttttgcaactcaacactgatctctgtcatagctggtgctgtccgccctgcagtccccacaggaggccctccatacccccatgccccgtatggtgctggtcgagggaactatgatgccttccgaggccagggaggttatcctgggaaacctcgcaacaggtgaggagggcagacgcccaagctttgttgccgcctgcagactcccttttgggagccctcagctctcatcctgtacctctcacctcacaggatggttcgtggagacccaagggccattgtggaatatcgggacctggatgccccagacgatgttgatttcttttgagccgtcccccgttcctcagtcctgtatcatccatacttgtactaccttgtcctatgaagctctgagaattttttgtacgatcagccttactgctaataaaagcacttccacagggctcctgactctcgtgtgttacataactcctccatccttccagagtaactcctgaggtgttgctcagccctgccacttttattattgatgtcaaaagcgccaggctttgcagggacaccagtgggaggtacataggtgcgtgtctgggacccgagaatctcagttctgtaacttcgtcctcagtccaaggtgcgctgctgctgttgggagctaaggctggtcaagcacaggttgtagaaggagttggggtcaaaggctgcactcacctcttgccagcccacccacccagcagcctgtagttcactgg

SEQ ID NO: 483041 - DNA, 957 bp, Homo Sapiens
atgtcctcttttttccatgcaatctttttcttttccagttagcctcttcatggcccccttgaactccttattccttaccgtataaattaatgggttcaagctgggagtaacaatggagtaaaatatactgagaagtttgccctcattctgatttggactgtttcctggctgtatatacatgtatgtaactgtcccacagaagatggataccacaacgagatgggaggaacaggtcccaaatgctttttgtcttcctgctgcagacttgatcttgagtacagccacagcaatgaaaccatatgacacaagaataagaagaagaggaacaagaactataatcaggcacatggcaaatgtggttacctccatggctgtggtgtccacacatgcaatcttgaatcttgatcattgcagacatttcacacacacaaaaaagtggtctaggtggtggttcctacatcgaggaagactcgtggcataaggggaaggtatgatgcaattaatcacaccaactacccaggagatgaccacaaggccctggcagagttggaggttcattatggtcatatgatgcagaggcttgcagatagcattgagtcgatcatatgacatcatggacagaaggatgcattcaactgagtacagtgccacatcaatgaaaagttgaaaggcacacccaccaaaggtaattcttttgtctttgccccagatactgaccaacatttgtgggactatatttgtggtataacagagatccaagatggccaaatttctaaggaagaagtacatggggacttggagatggtcatctaggaaagacaataggatgatggccatatttcccatgaaggcaatagtgtagaagaaaaagacaaccccagagatcatcatctgaagctgaggctgccctgtgaatccaaggagtataaaaccactgaagtggctatcattgatcat

SEQ ID NO: 483042 - DNA, 1000 bp, Homo Sapiens; identical to SEQ ID NO: 120080

SEQ ID NO: 483043 - DNA, 1000 bp, Homo Sapiens; identical to SEQ ID NO: 120080

SEQ ID NO: 483044 - DNA, 1000 bp, Homo Sapiens; identical to SEQ ID NO: 120080

SEQ ID NO: 483045 - DNA, 1000 bp, Homo Sapiens; identical to SEQ ID NO: 120080

SEQ ID NO: 483046 - DNA, 365 bp, Homo Sapiens
gaacattaggacagctttcaggtctatggtgagaaaggaaatatcttcaaataaaaactagacagaagcattctcataaacttgtttgtgatgtgtgaactcagccaacagaggtggatctttcttttgaaagagcagttctgaaaaacactttttgttgaatctgcaagtggacatttggatagatttgaagatttcgttggaaacgggaatatcttcatatcaaatctagacagaagcattctcagaaacgtctttgtgatgtttgcattcaactcatagagttgaacattccgtttcagagagcagctttgaggcactctttttgtagtatgtgcaagtggatatttggagcgctctgaggg

SEQ ID NO: 483047 - DNA, 1000 bp, Homo Sapiens; identical to SEQ ID NO: 309432

SEQ ID NO: 483048 - DNA, 1000 bp, Homo Sapiens
gatctgcccgccttggcctcccaaagtgctgggattacaggcatgagccaccgcacccagcctagaacttttaaaatgataaatgcacaatgaatgaaagtttctcctatacattggaactagcagccctgaatctctgcccacactctaagaaacaacatagtacatatgaatatcagaaattctgtcgataatttagacacagtattgtcactactcactaatgatggacagactctcaaactctagaatcagaaaatctgaataaaaatgtgacctcttccccttgggtcaatttttaccaacggtaagcctttttgtaatctatcaaatgcatttaataatagcttaatcctcacaggattattgttaagtgtaaaattaaatgatgactcttattagcactgatcacataataaacactcaaatgcattcccattttaacttttataatccctataactgcagctcacattattttttgtattccttggttctaaagccactagcatcttcatcatgattttgcaattgtcttctgttcttctattagtttcataaagaattgtcattctgaaaacatagggcagaatcactggtttatgtctaataatgtagtatacctaaacctcacacaaaaggcatctgctgacatagaagaaagggactttctatatgctcagatttaaactgcagtctgatttccagcactaaatttctaatactgggttttacttatatcctctcaattttagattccagagatgtatatgtttttaaacaccacagatacaacaggatcgttattgaaattgcatactgaaattcataggcctggtacacagtcactgcaaaatgttacatggcatataccgatggcgaccagattcattttatttatcactctattctcatgacctagagtaataactggcatattctatgtcactaataaatactggctgtgtgaaatattgtctgtgtgaccttttgcatgagc

SEQ ID NO: 483049 - DNA, 1000 bp, Homo Sapiens
gatcaacagaaagcctgagtctcagtgaggttaagtagtttgtctagagtgacagagctaataaaaggcagagctgagattggactcctctcatgtcaggaaggtccctgcagttctcctcttctcagatcacaacaaacaactcagattaacagcaccagaaacacagtctcagacccagaggcagagcctagagcccagggagacagggtgaccctgacctgtgctatcatggggaggttcaaaagagggacagcctctcctgcctggcaggtgtgactgcttctccaggaggtacaggtgtttctagaaacacctacagggctacccccagtgacctgtgctgatggagatgagaacatggagcaaatgaaaataggattgggagaggagaaacctgacactcagggattagcacagtccccttcttggtgggtgagaaatttatgaagtcagaaagctgctcactccattccactgtgagagggctcgtcacacttggatgctccacttggcaggtgtaaacctctccactccgaggaactgtttccagcatcaccagggtctggaaggtccaatctccattctggatcaggcctatggagaccaccgcagccttctcttcctgaccattctggaaccacctgacttcaatgctgcctggatagaaaccactcacagagcagaccagggggttgcggtgatgcaggggctcggtctttgcaggatacatagtccccttaggttgcactaggagaaaaaaaggtagagagaatgaatcaggaagttagagtctcgttgttcagctgtttgtttgcttctctgtaaacccaggctctggcctcgaccagtcctccagcacagctggccatacgccctcacagtgtcatcagcctggaatttaatcgtgatagtgtggacctatcagatttgagagatgttgtaaaaaattttgtttgtttcttcatagcttgaaattgtcacgcattgttaaagtgtt

SEQ ID NO: 483050 - DNA, 1000 bp, Homo Sapiens; identical to SEQ ID NO: 120081

SEQ ID NO: 483051 - DNA, 1000 bp, Homo Sapiens
aatgctcacagatggcgcgctccctctttctgtctctctcttcctctctctctctctctctcacacacacacacacacacactcagattcccagttcacagggacccaggccccgccccccaccatgcttacctcgcctctgcactgtgaagctctcaccaaccccgtagttgtgtctgcacacggtgtccacctcggcccgcctccgctccaggaagtccttctggctgttccaggactcggcgacaggccgccccagctccgtcaccgcccggtactcccccacgtcgctgtcgaagcgcacgttctcctcttggttatagatgcctctgtgcagataccgcacccgctccgtcccgttgaagaaatgacactcaaacttatcctgcttcaagaaacgtgctgtggggacacgaaggatccggtcacaggggcggcctccggggaagacactaacagagacgccaccatccggggctccctgggcggggtgctggcactggaaccttaactgatcccaaccataaccccgaccacgcgcagcccagaggctcatcctccgtcttcctgaggcgaacggggggtctgggggaccaggcgggaaaaccccttctgatcccaaggcttttgggaccccctccctgcctccagccggttctggagacctctaagcaggagctggaggaggatccgtccagcaccgcagcctgcacggactcctcctgggagcctccaccccaaacacactctctgctccttctctcagccctttaccctttaaaggctttacccttcccttaaacagcacccaccgcgttcatcctgtgcacacttccttagtgatgaccttgtgtttggcctgtgctgcctctaggaatccaaacaagggaaaacagacctctccactctgctgggggagcttaaagagcagtgaaagtgatggccaaaaacctaacacgcaagagcttagacaggaatgagaaatgtcagaagtgtggag

SEQ ID NO: 483052 - DNA, 1000 bp, Homo Sapiens
attattgaaattgcatactgaaaatgataggcctggtacacagtcactgcaaaatgttatatggcatgtactgatggagaccagattcattttattcatcactccattctcatgacttagagtagtagctggcatattctaagtcactaataaacatgggctgtgtgaaatattggctgtgtgacctcttcatgagcagtcaccactgcacacaggggccctctaatatttccttgataataatgaccgagcatctctggttcacaggtcctcctgcttctcttcagcctctttagccttttcctttagattcagctggcttcctgaacctagagcacagtccttccctgaagctctctactcaaaacagtcaaccttaacctcatcctcacttcttctgctggctcttcaaatagtccaatccagtttccatcctggatactccattgactgcaaataccaaccccagcaaacccagcacttgcttctctctcacattctcacttcacccacttagtgatactcattggcttctcccttcttcttgaaaaaaaatctattttccttgacttacaagcattgtgttctcttggtttttctccaacatccctggggctccctctcagtcccctttgctggcctgggcattcttcttttttctacacacaagctattaccatatgtatcctcttccactccctggaatttaacagagtacatgtattgatgctgtcaacataaacacctccagccctgaactcaccgtgagtctcttaaattcccttggccttctgattgttccacataaatgtcaataaatcatttccaaccactcacttcaaataatttcctcccacaattttccctatctcaataaacaccaccaccatccacttatttgtcaagacaaaatccttaggaataagcttgattattctatcccctttacagtaatccattaacaagctgagcaaaatacatgccgagtctgtccacttca

SEQ ID NO: 483053 - DNA, 1000 bp, Homo Sapiens
gatccaaagtctttcctattatttctgtctcacgccttatcacctctgccatcattctagggaaaccgaatctctttctgaaagaagattaaaaggtattaccttttgggtgaagtccagagtgtcctgggaaaaagaggaaaatatatatacttaaaaggtatggaagcaaatctgtcttccaatgcaatgtcccagccccagatctcccacctgagatttctctaacaccacaacccccaccaaccacggcagagaagagcagaaacagaccatgtgacccatgaagcatgaggtgtctgtcacaggatccagtgtaattgcattagccttagtggctcttccttaatttgcttcaggatctcgaagcaaaggacccctacttgttaacctttctcttatctctgcaggccacaagctattatgctttgacatagtaaccatgcactgatgatttctggattatcaggacattggaggtcatttggggaaagaaaggctttatccagggccactgatatactgagaactaatcctagcaaagccatatttcctcctccagaaaagcctatggagatactcagctcccaaaagctcctcacctttctgattcttgaagtagatgaacagccccgtcccaaggaagagcaggcccagcacgaagcccccgactccactcagcatcttgctctgtgcagattcagaccgtgctcctgagagaggaagccaggtttagtgacgtttattccaaattgaacctctttacttgagaccctaagattcagagctttcaaaatggggaagaaggctaccctgtaagaactaaaataactagctgtttctgggggaaaaaacgtttttcaaatcacactgaacagttacaaggtccaggcatcaacctcattcaaatattacagccttgatgtaaggcacaacttcaaaatctgatcaacagaaagcctgagtctcagtgaggttaagtagtttgtctagagtgaca

SEQ ID NO: 483054 - DNA, 1000 bp, Homo Sapiens
tcatgagctcagggattcgagacaagcctgggcaacatggcaaaaccctgtctctgccaaaaatacaaaaaattagccaggcgtggtggtgcgtgtctgtaatcccagctattcaggaggctgatgtgtgaggattacaggagcctgggaagcagaggctgcagtgagccatggtcgcaccactgccctccagcctgggtgacacagcaagactccatctaaaaaacaaacaaaaaaagaaaaaaaagaaaaagaaaaaaaaagaatgtcatgatggaacattttataataatgtttttactggatatacattctaggttaacattcttttcagccattaaaatatcttgtgccacttttgtctggtctgcatgatttctattgaacaatccactgtcatttaatttattttctcctgtgcatgagatgtcatttctctcttgttgctttcgagattttttttggcataaatttctttggatttattttcgtttgggtttgcacagattcttgaatttttacatttaagtctttgtccgaatttggaaaatagtcagtctttcttcaaacactctttgtgcatcacccatttgtcatctccctctaagactccagttacacaaatttcatagcttttgttatagtcttacagatttatcagcatgaaataatactaaatattatgaacaactttacaaaaataaatgtgcatgtaataaataaattattcaaaatgtacaatgtactgaagctgacaaataacataaaacaggaagagttccacatgtcatagagaaagtaagtccattctataatgctttcccaagacaaaaccccaggttcatctagcttcagtaactatttaaaaatatttaaggaacaaacaacactaactttatacaaacttcaaacatatttgaaaaaaggaaaagcacttgcagttatgtttgatgagatctgtgtaaactttacttcaagacctgaagggaactctacaacg

SEQ ID NO: 483055 - DNA, 1000 bp, Homo Sapiens; identical to SEQ ID NO: 309433

SEQ ID NO: 483056 - DNA, 1000 bp, Homo Sapiens; identical to SEQ ID NO: 309434

SEQ ID NO: 483057 - DNA, 1000 bp, Homo Sapiens
ttgcatctatgttcattagggattttggcctgcagttttctgtttttttcatgttctagtcttattttcatattagtataatgctagccttacagaatgattttagaagaattctctctccaattttctgaaatagtttgagaagaattagtattagttcttctttaagtatttggtagaattcatcagtaattccatttagcattgggcttttcttagttgggaaactttttagagctacttcaatctcattactcattattggtctattcaaggtttctgtttgatcttggttcaatcttggtatgttgtatgtgcccaggaatttattcatttcctctaggttttccatttgtttgtgtattgctatttataatagtctcttaggatgttttgcatttctgtgatatcagttgtaatgtctcttttatcaattgtgattttatttatttgagtcttctctcaaaaaaatccactttttgtttcattaatcttttgtaaagctttttagtttttattttatttatttctgctctatctttatttttttgggggtttggtttgttcttgcttactagttctttggtatgcatattaagttcttcatttaaagcttttttttttctttttttgatgtaggcatttattgctaaaaaaaaaacccctttcctcttactattgcttttgctatgttttacaggttttggtatcttgtatttctatttttatttgtttcaaaaaatttttaatttttaaattaaaatttttttttcatttcttcattgacccattgatcattcaggagcatattgtttaatttccatatatttgcaaaaattctaaagtttttcttattatttattgatttctagttttattttattgttgtaagaaaatatccttgatatggttttgatttttaaaatttgttgagatttgtttgtggtataacatgtggtctgtaatattttatgtgctgatatgacaaatgtgtctattc

SEQ ID NO: 483058 - DNA, 1000 bp, Homo Sapiens; identical to SEQ ID NO: 309436

SEQ ID NO: 483059 - DNA, 1000 bp, Homo Sapiens; identical to SEQ ID NO: 309438

SEQ ID NO: 483060 - DNA, 1000 bp, Homo Sapiens
tcagtgagtcatccacgactttattatccaccagtttgatttgtacaatctttgcgcttaaatccacgacaaaaaggccacagtgtgatgcacccaattgacagagacctgtcttctcccagccaggccccagcccaccccacaagcccttgtccccaggacacatggagccttccaggtgccctacatgagtcccccatcactctgtagctgtccaccctggggccacacctacaggaatcacatcagcccccagggccacaagagacctagctgactgattcaggctgagcgccattgcccatcctccttgggctgattcattggcccagagcctccagaactgtgtccccaaagggcaggtcatgggctacaaccccagtccaggagtgcctgctctccagggactccttccactaagcaggcgctgacgagagcaccaaaggggagcttgggagtgactgcatgtgtgtgcctgtctaggcaacctagagtctgtctgtgcctgacaccctctgacagttccggagtgcaaacgtgtaggtgtgagggtgtgtgtgtgtgtgtgtgtgtgtgtgtatagccacagctgctagcagaagttctaattagagaaacaagaacattcagtgtaaagtttaattttagagattaattaattttctggttttcattttccctggcaatcagtaaagctaccaagaaaatagaccaaagaattggtttctctctaagtctgtgcatgtgtgggagatgaggctgtctgagacgacctaggcagaaatggtcaatacaggcaaaaataataatagaggtcccccttcccctcttgtgagaccaggctctgtctcaggaacaggcctgagggaggaggagccacgttcctccttccttggagccctgaggtggccaggctctccccacacaaagcatgacatccaggtgccagctggctaagaaatggagcctgaggctgcagctcaccacctgtacctcacag

SEQ ID NO: 483061 - DNA, 1000 bp, Homo Sapiens
  misc_feature (167)..(167): n is a, c, g, or t
ctcgaggatcacgaggtcaggagattgagaccatcctggctaaaacggtgaaaccccatctctactaaaaatacaaaaaaattagccgggcgtagtggcgggcgcctgtagtcccagctacttgggaggctgaggcaggagaatggcgtgaacccgggtggcggagngttgtcagtgagccgagatcccgccactgcactcccaggcctggggggacagagcgagactccatctcaaaaaaaaaaaaaaaaacagaaagatgtaaaaagatgccccccttcagtaataaatgaaaacaaaatgtcttagtaactaacagaagcacattaaatatcaacaaatgtatacaaatatgaacacaattaacaaactagacttctgatatataaaaataagatactcccaaactacagaacatgtattcttcataggattacatgggatattttaccaacatagaccatgtattagatcataaaataagtcaccacaaatttcaaaaaaactgaaatccatccagagaatattttctgactacaatggaattaagctaaaagtcaatcataaaaaggcaactagaaaaatccccaaacaccaaaaagtacagtaacactgtatttctaaataattcatgaataaaaataaaaacaaattagccagtattttcaattaaataataaaaataagatagcaaaagatgagggttgtaatgctgtaccttaaagggaaactgatatatatgtttaagtatatattttttaaaagttgccaaaaaatgataaattatacccaaagaaagtagaaggaagaaaataataatgagcagacataattaaaattgaaaacaaatgtataaaatagaaaaaaatcaataaaccaaaagttggatcctaataaagactaataaaatctaattaaaaaaagtgccttctagaaacattgatcaagggagaagtgacaaatttgtagaggtacacacatacccatgcactcatataca

SEQ ID NO: 483062 - DNA, 1000 bp, Homo Sapiens
ataaaaccaaaggcagagatatattttggcaagaaaagggggtgcccccgtttcacattcaatcctttctggacagagccttccctgttggaggttcaaaaggaagcaactgtaccccagcaagtaggtcaaattcagggtcaaagagcatgcaaggccgggcgcagtggcttacgcctgtaatcccagctgctcgggaggctgaggcacgagaatcgcttgaacccgggaggcggaggttgcagtgagccgagatcgtgccactgtactccaggctgggccacagagtgagactccgtctaaaaaaaaaaaaaaaatggccaggtgtggtggttcatgcctgtgatcccagcactttgggaggctgaggctggtgaatcacctgaggtcaggagttcaagaccagcctggccaacacggtgaaaccccgtctctactaaaaatacaaaaattagccgggcgtggtggcgcgcgcctatagtcccagctactcaggaggctgaggcaggagaatcgcttgaacccgggaggtggaggttgcagtgagctgagattgcgccactgcactccagcctgggggacagagcaagactccgtctaaaaaaaaaaatagcaatgcaagaccctcttccaatgtctgcatgcccttcctggggttgggagggacgcagagaaggggtgggagctctggatgggaaaaaggggccgaggaagggagagtgcttggtaaaaggatcagggaggagttgggggtccccgggttggattggggtcaacccaaaaccctgctgctgatgcccactgtccatccagcacccccagcccctgaatcctcagaacaggcagatgggctgtccgaggggccaagggctccgcggaaaggcgcgggaggggcgctctgtccacttcctactgcagcccggagcgctgcgtgagctggggctggagggacagcgacctgggccgggtgctgaggcgaggctggagacgccggagcacg

SEQ ID NO: 483063 - DNA, 1000 bp, Homo Sapiens
ctcgaggatcttctatttacttcaaggtgacagaagagttagtttttcgtgatgaaagactacaggaacggagaattaacaaactgttgtgtaattcatcagagaagtatattaactctgctgaagtaccactgaatgaaacaaaaatgaatctgtgaagtagcaatctgattagcaggctggcttctatgtcccatcactctcatagtcttctattattatattttcttccacgtctccttgggctgaaaagagctgaggctggctggcaggcagttcactggcactattctgactcagaggaagagaccaggtttccagctctgtgtcctgtgcgggttcacccagagattcctctgcagaatgtcctccgttaagctgggcttcatctccactgtcagggtcgatcattccatgttccctgtcagtcagggcttccattttcagtcttccgaagtgttgcttcagagggagccttccaatatcttggataagagaaatctgagcttgatttctcattggaatggttattagagcaaggtatggcagtagctgagtttggaggcataaagctggtaggcagaagtcaggaaaaagtgcttttgctgccaggcaattttccccatactttttatgtattagaaaccactgcggtgtgtgcaagggtcaaaaacttgatccttctccttggcaatgagcatatcctccagctttgttggaatgtatcacacctcttgtagctatagatgtcctatatttcctgagtaaagagcgtgtattccagtcaccactgaggatacctgcaaaacttagaaattcactggctctcacaatatcatcaatttccatgaagaagtctatgtagttttggtgaagatataaattaaataagtctcctggcatgtgtgacatttctactacctcctcaggttcaacaagtatgtatcctgttcatattctgataaatgagagggcaaccaagatgagtctgattctgtta

SEQ ID NO: 483064 - DNA, 1000 bp, Homo Sapiens; identical to SEQ ID NO: 120082

SEQ ID NO: 483065 - DNA, 1000 bp, Homo Sapiens
tcactcatcagcaatctcggtctcctggtggacgaccaccttggtcactgacatgtctgggtgctgctcctttgcctccttgatggcttgtacaaggacctgatcatggtcaatatcagcatctcctgtgatcacaattctcttttcaatacgtgtctctgaaatcccaccttttacagtcttggtaatttgagttgtggtggtgctgcttggggtctcagatgtgatagtttgagctgtcagcaagactcctgggtccaagtctccactgttgtcgtcagtctgggcagcctcataagtgatggtcttggtctcagtgtggacaatagggacgtctttggttgggatttcacttttcacagcattggcattatctgagatggtgacagtttgtgtcttcaccaggggaggtccttctcctgtggggatttgcccattgatgttaagagttcggaagggtgagtgagtggataagcgtttatcccattcactaggccgtggttctggtacagactccatgaagttctttttcagctcactgatgctggcatgatgtttttcgatctcctcttgactcttgtctaaatcctccaacattaaactgctatgtctgatataaatgttttcaccatctagtctttctctctttttcttcctcattcttatcagatcttcagttttttctgcaagcttctgtgtttggtcaccatttgaggtgggtactgtcacctcgatgtgggttttttccaccttccatgcttctgtgggctctggctcagcttgctcaggtggctcgtcttcctttttcacttcagccttcactgtttccttctgtgctttagggaccactgtttttttagcagaggcatctaggacgccaccttctgcaacctgaccctgagtaatggcaggtgcagaagtgggccgaggacttcggtctgccgaatcgacagctgctgctccatcgaggctccgggacgcccgtttacttgctgtacgc

SEQ ID NO: 483066 - DNA, 1000 bp, Homo Sapiens
cgacccttctcagtggacagaagccatcccttaggtgctctgcccacactgggaccaggccctgtgggcacctcacaggcttctctgcggccctggctgctggtttgttcacactgagagtcctccctcggggcctcccttgacccctaggccctaattaatcagaggaaatgatggacccacagctggggtgggaggtgctccctcatggggacagcagcccaaagagctgtgaacaaaccaggtgcccttggtgaccccaggagccaccagttgtgtcctggaagctgggcctcccatgagacatgtccccctcagccatcagcagacagcaagggcggggaccctgccagcctagagcacacccaaccactagagggcaccctgatggcggaggttcagttgtgctgacagctggggtctctcatgggctcaccttatgggacagggggaggcagccagggagcccctggtggggcagcttcagggactgtgccctgccatctggggtcgctaaggaagcacgctgaggaggagggggctggcccaccagcaccttcatgggccactgttctcccggtggcccagccctttggtccccagcacccattcaggatcccactgtgcccaccagaggtccaccagagccctgacaggagaggggccttgggtttgtagcagggacactgcccagccagcgctagggggcgctcccggcccgcgcttcgagccccatgctctgcctgccttggtgtggatgctggcactgcctgcctgttggcctggtccccccactgccctgcaggcctcagccttcaggcccatgtgggcctccccatcctgccactgtcaccaggcgtcccatggccaggcctgcctctggggcccagcatagggtttctgggcaagtgggggcattagggatgcagagtcccttgtaaggccacttccaccaggcctgcgcccacacgtgcttccctgaatggggttgagttaaacc

SEQ ID NO: 483067 - DNA, 1000 bp, Homo Sapiens
tttgagaatatctgccctttaatttgcatttaaaatcagtttctttaaatactttagttacaaggttctgaatagtgaagacagagtagtagatgctgcaggcactcagtattggctcccaccccttcccccctcccccacccccaggcctcacttacttggcttaagatacaaaagggcactctctactggccctggtgtcaaacgtcagcagcctcaggcctggatgcagttggatacaaagccatgaatcccagtggctccaaggaattccaatgagttgtgcccagattccacgggcaacacaccttagaaatgacctcatccgtttcaccactaggtactaacaccctcagggtggtttcctaccgcagtccacgtcctccagatctgtgtcctgcagaggaagagacaaggccccgctataacgcaggaaggaacaaaaactgcctcctcagcccaggtgcttacagcaacttaactgaaaagctcaaggcaatgtgagtcagtctagaggagacctcccttccctagtctctaccaggctctggcccttcctcgggaccacgcttggtcccactgccatgatgtgctagaatctgctctaagaacaaggtgctagaatgaggcccagcaaccagcaaaggggttggaaagggttgctacagccccagctgtgtgagattgtgccaagacgagtcttcttggtgtcagcctatgatggagagcgtgagggcaggcctgggctctccttctatgatgattacaatgcatgacctcaggggacctctgccctctcctcccactcacacacccagatcccctggcctgtgcttcctggaagaggtagaagaggcatcttgaagtcaatgacaacggagaatgaaggtgccattgaagaagcaaagcagcacctctttgcctgtgttcaatccctccacacaagtggaatcaagggagaatgtgcacagccaggacagaggctgctctgagcttggga

SEQ ID NO: 483068 - DNA, 1000 bp, Homo Sapiens
gggtctccttttatttatttatttttgagaacatctgccctttaatttgcatttaaaatcagtttctttaaatactttagttacaagttctgaatagtgaagacagagtagtagatgctgcaggcactcagtattggctcccaccccttccccccttcccccaacccccaggcctcacttccttggctcaagatacaaaagggcactctctactggccctagtgtcaaatgtcagcagcctcaggcctggatgcagttggatacaaagccatgaatcccagtagctccaaggaattccaatgattgtgcccagatccaccggcaacacatcttagaaatgacctcatccattacaccactatctactaacaccctcagggtggtttcctaccccagtccacgtcctccaaatctgtgtcctgcagaggaagagacaaggccccgctataacgcaggaaggaacaagaactgccttctcagcccacgggcttacagcaacttacttgaaaagctcaaggcaatctgagtctagaggagacctcccttccctagtctctaccaggctctggcccttcttcgggactacgcttggttccactgccatgatgtgctagaatctgctctaagtaagaacaaggtgctagaatgaggcccagcaaccaggaaagggttgctacagccccagctgtgtgagattgtgccaagatgagtcttcttggtgtgagcctatgatggagagcgtgagggcagacctgggctctccttctatgatgattacaacacgtgacctcagggaacctctgctctctcctcccattcacacacccagatcccctggcctgtgcttcctggtagaggtagaagagacatcttgaagtcaatgacaatggagaatgaaggtgccattgaagaaggaaagcagcacctctttgcctgtgttcaatccctccatacaagtggaatcgagaatgtgcacagccaggacagaggctgctctgag

SEQ ID NO: 483069 - DNA, 1000 bp, Homo Sapiens
aaatccatttttctattacctcaaaagagagtagtacaaattgtggtcctcccacctgttcccttacacacacacatacacatgcacacacacacagatgcacacacatacacacacatgcgtacacacgttatactggagagcacagtccaatgcccactgttttcagagtgaggccttcttgttactcaaaccactctctaatgttttaattcagagctcctcatcagagctcgactcagagctgccttcacatccttgttccgcagactgtagatgaaaggattcaacatgggggtcaccacagcataagagagtaccatcaccttttcctgctcagctgaggccatggagcgaggctgcatgtaggtaaagagggccatcccataggatatggagaccacagtgaggtgggaggcacaggtcccaaaggccttgcggtgcccctgggtggagtggatctgcaggacggcaactacaatgagggtgtaggacagcgagaccaggcagcagggcaccagcagcaccaccacactggaggccactatgaccacctgattgaaggtgatgtccacgcaggccgacctgaccagtgccagtgtctcacaggccacatggttcagcacgttgtgcccacaggtgggcaggtgcatggtcagtgccgtctccatagcagaattagccaggcccactagccaagagacagctgccagtgccatgcagagccttgggctcatcactgctatgtaacacagggggtcgcaaacagccacgtagcggtcataggccattgcggccagcaacaaaaactcggtccctccgagggccagggagaaaaagagctgggtcccacatcgggcaaaggagatggtctttctttgctggtgcagtgcaccagcatctgagggaccctgctggaggtgtagcagatgtccacaagtgagaggttgcagaggaagaaatacatgggcaggtggagtctcacgtccagccagatcag

SEQ ID NO: 483070 - DNA, 1000 bp, Homo Sapiens; identical to SEQ ID NO: 309442

SEQ ID NO: 483071 - DNA, 1000 bp, Homo Sapiens; identical to SEQ ID NO: 309443

SEQ ID NO: 483072 - DNA, 1000 bp, Homo Sapiens
gaaaggaggataaacgctcaagggagggcatgcctggtggagggaacggcttgagcagaagctgggatgtggcagatccggagcggggcggggggcatttgcagaactctgaccagccaccgtgtggctggggcaccgagatccaggcctctgtttccctatctagatgcatcgatggggaaagggaggcccccagaccaaaggggcggggcctgggcctcttgcctcctggccctattggctgccaggggtctctccccgagaggtctcatcctttttttgccacaaaattcagtagttctgggctttttaactcccctcctctgtctgaaaccggaaaagtctgttgagcaaacgcggtgggaggaggcagggcgggcccggccggggaaacgcgcgccgctgttgccacctggtggccatggggagaatctggactacccgctaatcgccagggctggggtgggatttcaggagcccccccccacacctcggctcagaccgcagtggggatcagggggaggcggctgcagaacgcgagggaggtggggcagtgtgggcagaaagagggaggattcagggtgtgtaaggggggcaagggtcctgctgcgagttggtgggcgtgaggaggaaggagcgtgggggcaaaccacggttcctgttaccggagtgcccggctgctccactccccctaggccgtcccttcccctgctcagtcctaacttagtagggttccaagctctcatccggctctgtctcccccggattaggtgctcctggaggagacctagaggaagagattaataaatatatgtggaatgaatgaatgaatgaatgaatgaatgaattccaaggctcgtgttttgagattttgagcaggacattcaagcttcaaacaggaaaaaaatacccaagaggaggctcatttacgatgattttgaacagctgtgtaaggtcattatcaccacccccattttataggggggtgagggtggggtgg

SEQ ID NO: 483073 - DNA, 1000 bp, Homo Sapiens
acggcggtggtggtggtgccagaggccatgtctgcacgggaaaggaatctgcagtgggcgagcgctcgggactaagggaaccaagcgagccacagagcggtggctgtgccaacctcactgcgcgggagtgagcagtgcggagaccaggggcgggccttgactcctcctcttcctccccgggacagctggattggctgcttgtgtgggatctcccccgccaccccttccccaaatcgaagttcccgcgttccgccccttttgcagacctttccggttctccaggtttttgtcgttttttttttttttttatccccagttataactaacggataatgataataatggagaccatttatagagcgctgtattgttccagactgtgtgttttgcactttaattggcttacttaactttcgctaaaaccttataaggaagagcagcactccctgcttggcccaatattagtggcgtcggaggcctcagctgcaaaatctggcccggcggcattccagaagttctcgcgggagggagaatcctcaccaaggcgggtactggccggccacggagattctcttaggcagctaacgcggggcggccgccgcggcgggggcaagatttgtccttcctgcggctgcgaacccaccgcgggtttgcgtatttcccttgattcctggaggacagagctgggatggacttgacccaagactcagggatgacgaaagggaaataaacagagtaacgtagtactggataatctttctgatttacgaactatgatttactcatcttcaatttgaggggccgcttttagggggttgagaccttgcacaactcccagtctggctctacctggctgggggcatctttaacccgttctacgccggagcggcatcgaatacacctggattcaagaatccaaactcaggtctccgtcattcaacactagcaggacgcacacacacacacaccacgagccctttacagggataatccctcatgc

SEQ ID NO: 483074 - DNA, 418 bp, Homo Sapiens
catgtgtatatatttaattttaagccactgtctcagtaataaagaaggataaataggtatagaccaaatgtaagttaaaatgtttgatttcattgaatgaattaagagaaagtcagtcacctatataatgccacatgactgtatcttccatagttaccttttgaagaagaaaactggaggctgtttattgcacttctgatatcaccagaacatccctgacagagcaactctagagaagttttgtcagggacagtaatttttcctccattctaaaataagaaaattaaatttaaaaaaaagtattttcttaaaaataacaacaacaaaaaaccccaacctattttctaaacttaattaacgtaaattagattcttttaaacttaaatactaaaaagggctgggcacggtggcacattcc

SEQ ID NO: 483075 - DNA, 1000 bp, Homo Sapiens; identical to SEQ ID NO: 309445

SEQ ID NO: 483076 - DNA, 1000 bp, Homo Sapiens; identical to SEQ ID NO: 309446

SEQ ID NO: 483077 - DNA, 1000 bp, Homo Sapiens
gacctgcacttcttcatctgtaaagttgggacaattaaaaaaacccaaacaacctaccttatagggttatcataaggattcaaaggcgctaagtatcattccattgcatatagaattcaatacatgttagctatccttaataagttttttttttttttttgcttaacatgaaaaatgttttgcttcttttcaagtattttaattgctttttaacttcctatcattctatcatttatccaacaaatatttattgagcactacaattttccaggcactcttgtaggtgctggggatatagcagtgaccaggactggcaaggtcctgcactcacggagctgacagcctactaagggagacagacagtaagtaagaaaggaaaagatcaatttagtagatgcttctaagggaacagctctgccatgaatgtcttcacatacgccacacagacaaggccaacagcagtctgacccatcttggaggaatgccatgtgatcctcccaggaacactgtaacataaccagtcttgggaagaagctgtcccaaggccatttgtcacccacctccctatgttgtgggagctgccataaggcagtttctcatctgcctccctggttctgataagacatgggactttcaacattgcctcctcacttaggggagagctgcaaggttatacaatcatttagctagagtctgaagctgactcctccaggacatagcaacccaccacttgtgggtaaattatataacatgttattgggttatacgacgccaaactgcctatcaccggccattttttacctgcaaaaatggtaatttcatatggttcaacttactagaaggtggtaagtgcaactgaaaaaaaaagagtaaagaggttcagcagtgggaagctggatgcagtattcaagagggtagccaagtggacctcagcgggctgacattttaggggaagaaggggattcaggagttctggatattgcactcacatgtggtaaca

SEQ ID NO: 483078 - DNA, 1000 bp, Homo Sapiens; identical to SEQ ID NO: 309447

SEQ ID NO: 483079 - DNA, 1000 bp, Homo Sapiens; identical to SEQ ID NO: 309448

SEQ ID NO: 483080 - DNA, 1000 bp, Homo Sapiens
gctttatggccttctcttgactttctgcagaataacttatactgtaattcccattcctttgggaatccctaaataattctttgaacttgggcctcaagggaaagactgaacacattgtactggtgtctcaggctctaagttgcctgtggcatgtttccaacacccgagatagctggctctgttactggatgtaacaacaggctatggtactgtcaaggtgatgactagcatccaagaagaattctctattttgtcaggaaagcaatttgtctgcagttactgctctaaaatcagtacatggtcctgccccataataattcataccccagctgttgactttaagagcaggaatctgaaaggcttgaggtttcaagagtgaaggtaagggtagccttaagttagcagaaggccctgcagaaaggtgtcaggggattcccactgtaatactcaggttacccttttgaaataaagcactgttgttgacaggtttagttgaaggtcagaaagtggggatcctaaacatctattccacattcactctcatatgatgcaagtgcttagaaaatggttagggtaagcagaacaattaaaggaaaaacattttcccttcagcattgggcttctcaagcagtgtgtccagtttggaaaactgtcccttcagggtttcagtgaatagaagtgaaaatattccatctagtggtcaaagaagggaagatgaaatgagaagtttccaggatgaggtctgtggggcaaggtgacaggcagtggcctctcagcaggtatcttttccagaacatgatagaacctgaccttggcggtggtgatatgttttgattatgtctgcactggatgaggaattggggacaccatccttgcaaggcctctgagcaaaactgtcctcacagtgaggaataatgatgttgcaaatggcagattataaacagcctgactctgaagggaggctctctcccatccccaaccccttccttcttacagagga

SEQ ID NO: 483081 - DNA, 257 bp, Homo Sapiens
cgccacttgtccctctaagaagttgggggacgccgaccgctcgggggtcgcgtaactagttagcatgccagagtctcgttcgttatcggaattaaccagacaaatcgctccaccaactaagaacggccatgcaccaccacccacggaatcgagaaagagctatcaatctgtcaatcctgtccgtgtccgggccgggtgaggtttcccgtgttgagtcaaattaagccgcaggctccactcctggtggtgcccttccg

SEQ ID NO: 483082 - DNA, 1000 bp, Homo Sapiens
cagcaggtgccctccctgatctctcaccccacctggcacttggcctccagggatgtgcggaagttcaaggagacaaagaagcagtttgacaaggtgcgggaggacctggagctgtccctggtgaggaacgcccaggccccgaggcaccggccccacgaggtggaggaagccaccggggccctcaccctcaccaggaagtgcttccgccacctggcactggactatgtgctccaggtcagccccagaaatgggctggggggcggggaccagctgtagcgaatggaggcctcaacggccttgtacagaactggagggattttgagcaggagtgacgattcttgctttgcccatgggtgggaactccagacatggggaagcagtccaggaccatgggaggatgaggctggcccagagctgggagctgaagacgacctgggggtctcagggaaccacaagcagctcaggtggactctatggcaggtgcagggcttggggctgcctcagcctccggggctcacctgtgggctccccctctggcagatcaatgttctgcaggccaagaagaagtttgagatcctggactctgtgagtgcgtgggggctgcccctgagcacaggctgcatgttgggggctggaccgggtgtgcttgggcctcacctgtgctgcccccgcagatgctgtccttcatgcacgcccagtccagcttcttccagcagggctacagcctcctgcaccagctggacccctacatgaagaagctggcagccgaggtgagcctttgggaggggtggggctgggccaggcctccgtgaccttccctaatgccacccccaacagctggaccagctggtgatcgactctgcggtggaaaagcgtgagatggagcgaaagcacgccgccatccagcagcgggtgaggccgcgcagccggctccctgcacaccaggcgcctgggaggcccctgcgtcctcaccccatgcccggcacaccctccccgcccc

SEQ ID NO: 483083 - DNA, 1000 bp, Homo Sapiens
cctacaaggttggggaactcatctcccctcctctccgcttcccttgggctgctggggagctcagcgaaaactcagacctgaccctgccacatagcatggcggccaaggcctgcagggctgggcagcaccggcttgccagcctcttcccgctggctctcaggactggcagggagggagggaggccacacgcgccactgtttacagggtgctcctccacgccactgctcacccagtgtctcagttcagtcgccaagtgttaagtaccattggccctgttagtatcacccccattttacaggtgggcaaacacactgcagcatatagcacacagcaaacctgtaggtgctcagagcagtgaagaactgccctgggtccccagccctggtgcgtccagcctgcccgctcccgagccacgggccacagctggatgttgggaggctccagaaagaggcaggtgtgcttctccagggcatccagcagtggcagggcaaacacgctgcggaagcaggtggacaggagctgagacttcctttccaagtctatgggaggcctcagcttgctgttgggaagacagagggccattagcatggggctggggcctggggaggtccctgagtggcgtctgccttcatccctgcagacttcaggccttctgctgttcacagagactcttgtgcacacatctgcctccctggcccacctgcctctgcagggccttgagctggggcatcctggccaggtgatgtcctggtccatctctcctctcagtccctggctttaaatgccaccctgatgctgtctaaggagcatctccatcttgatgcattcccccagggtagctgcacctgcagcccgccccatcacagtggactgcagtgccgtcctccttgttgcttgggcgaagcctcagcaccttctccattcttttccctcccttgaaagctgcgtccagccctccagcagctcctgacagctctaccatcacaatttattcgacatt

SEQ ID NO: 483084 - DNA, 1000 bp, Homo Sapiens
cgcctatgcacattacccttgtttcattactttttcatgtcatttttttatcccaaaaaatattttttaaaagttaaaaaaagacatatcaaacatgcaaatacttgaatccagcaggccaatagtgaaatgtgaacactttctaattctacacttccaggttgacatcagtacacagaaacaggctctaggaaaaatttctaagttcatagcctacgtgtgtgtatgtgtgcgtgttgaaacagaagtgtgtgtgtgtgtgtgcatgtgtggcgcgtgctcctgcacggcgtgcagttttctgtgtttgtgtgtttgaaagcgtgtgaggatttaactgtgggttttcccttgtattcagtatacgctttttttttggcgcattggtcaaacggttgttattattagcttctaactttgcactgagtgtcctcgcccttcctttagctaatcctatacattacagagaattcctaggacagggctggcgacaattcatgtgtaaatgtttactcaaggactctgtgactgcgtttaaaaagtacagtgtatatctctggagaaataacatgtatacctacctttagcagctttttattgtggactaatgcaagaaaattattaccagagtattgcaccatttttccatttggaatataaagttaaagagaaaaaaaaaaaaactgttgttgaactgtggccatagatacttgtaaagaatggatggttccgtggaaggaacagaaacaagcacttgggcgtgggttgtgactgcttttgggggagcctggggtttgggctcccacctgtttacagacctttttttctccttcagactttaaaattttaaaaatttaaaaaggaattaaaaaaaaaaaagacttccgtcgtaaagaaacctattttcagaatgcagatgcgttccttcagagctctgggacgggacagtgttgttccctcggccatcgtcgtggactctgtcgattgctttcgccccttc

SEQ ID NO: 483085 - DNA, 1000 bp, Homo Sapiens
gtaagaaatctgattattcaaatttattaccatcaagaattatgcaatgatgctgtagtttttcttaacaaatagaaaacagactgtgtacaacagtgaactctacagcactagcatccacaaggtaaaaatgaatgtttcatcatccaacattaccaaccctggaatgttgatcttgacttagcctagctaggtttggggacgtcggcaccacgtccctcagctaaaacagctatgcacccttccccgcccccacttacctatctagatagcgctgcccagaggaagaggcgctctccctgcccctcagcaagctgggataataaggactgattagagtaccattgatagaagtccagtagtcttgccacattggtttatgagggcatcttggagtggaaaagagcgattatcgggggctttgaaaacagctgcaaaccagggaggaaaatcatctggcccctgctctgaggacagacatgtgctaccaggcccactggcctggacctgaaaggccagccacgcccccgcttggccctgaggtgcatggggtgtggcacacaccctaacctgtgctattcaccttggccacacagccagaccccacagcctacaaacaccacaccatactgcaatgctggggaccaaagccaggctctgtgggcccaggtcagccagcagctccctcgggaaccccaggcacacggagttgcttcccctcttgagggtttgaagcagaagccaagggctgactctttttttttttcttgggttttttgttttttttgttttttatttttgtggttttttgtttttgttttaacctttgcaaacacgatggtgatgaggaatgccttgccaggctctcccagacacatctgtggttctgggctgtgaatgttaaacacacactgggatagacgaccagggatgagtgttccctatcttctccccgcccaccactgtcaatgtggcctaaaaaaaggctttaaagggaaaa

SEQ ID NO: 483086 - DNA, 1000 bp, Homo Sapiens; identical to SEQ ID NO: 309452

SEQ ID NO: 483087 - DNA, 199 bp, Homo Sapiens
cttccatggcgactcgacggcgacagcggcgggggctcccgggagggacagaacaggcagcaggtgcactccggacaacgggctcgctcacgcctctctacacaaaccaacccacgcagtgacactgctttagagcacaatggatctcgagggatcttccatacctaccagttctgcgcctgcaggtcgcggccgcgac

SEQ ID NO: 483088 - DNA, 1000 bp, Homo Sapiens; identical to SEQ ID NO: 309454

SEQ ID NO: 483089 - DNA, 1000 bp, Homo Sapiens; identical to SEQ ID NO: 120084

SEQ ID NO: 483090 - DNA, 1000 bp, Homo Sapiens; identical to SEQ ID NO: 309456

SEQ ID NO: 483091 - DNA, 1000 bp, Homo Sapiens
tcccgccctcgctccctcccttcctccgcggccggggagtccctcacctcagagcgcccaggcgccgcaggccagccccatggggaagcgcagacgccggagcctgagtcgcagccgcaggagcgctcggccgcccccgccgcgcccgtcagcgcctggctcccgcccgccggagacgccggcccgaggtggcgccggagctgctggcagaggggcggcgggcggcggcggcggcggctacaggagggactgacaaagccccacggcacgccgctccctacttatagcaccggcgggtcgccatggagacgcaccagctcaaaccagccacgatcggttccggccgggacacggccgggggaggggcgggggcccggcggtggccaacccgggcccgcgcggagctggtggggcgccggcgggccgacgtcagccgagccgagcaccgcctgccccacgcgtggcccccgcccccggcttcgcgccccgccctccccgccctgcggccgcctctccccgccctccccgccctgcggccgcctcgccccgccccgccctgcggcggtctcgcccgcctggaactggtccgcgcacgcgcacgacgccgcaggccccggccccggcccgcggcagctgaacggcagagcctgtagctgcacagctgtgcttccacctggcgttcagtacctcgtgcccgagagcggaaaagggaaatcgcgagcggaggaccgatgtgctggccacgtgggccccgccgggccgactccggaccctgctgccgcccattcctccggtgcaagggacctggaagtgatcccggtgccgctctgctcccaccagctagggagcagaggcgcgggagggaaggggcgtcccgggggtcgccagcacgctgcgggcagggctggcagccgcctccacgcccccgcgctggaagcctcgtctttgtaacatcgaggtatcctgtaactagatgggtcctggcctgcggaggtagttt

SEQ ID NO: 483092 - DNA, 1000 bp, Homo Sapiens
gcagctgacctatgctgactaataatcgcatgattacaacacttttttttctgcttggttaattggttaggtgctagaggcacttatatttggatatgatggtagattttacctactaattaaacaagaaaacccttagggcaatacaaaatttagggcaaatatttttcatataggctttgtaattttaaataatgcaatcaagtaaaaatgccgtgatcaaaaatatcacaatttcttgagttataccaatggcatgtaatttttttattatttcattttgcatcctaagaaaaagaatctcttttatgctactgcagaacaacttgctttgtctcccagttacatacaaaagtaacctatttttccatcaatataaaaatatatgcatatatatatgaatacactgttgataactctatcttgtttaatttgacttgaaacatgttgatactacagggagaggggtgagggtgggttttacagttctcacttccatggttcccacctatgtgaaagaaacagtctccaaactggatcagcttttgtgtattactctgtgaggactccagatcttgtgtgtgtggttgtatatgtgtgtatgtgtgtttgaatgaggggtggggtagggagtgaagtatatccctccagggcactgtaaatgcccctggcaagcaccttaaatcccctttgttctgtttcaggtccagagttggcactcagaaactagaaatgactaactgagataaagaacggagtctgtgcatctttggaggtgtttggaaatctaggttgtagatatcagagaaatgagtgagaaggagcaggttagcatatgtaggaacaacattacttgaaataaacaggaattggctggtaagttagcagtctaaaagccagatttggagagaaggcactcaggattagtgagtcagagtcagcttagacaagtgctaactaaactctagcatgactcactgagttgcaagaggagagccct

SEQ ID NO: 483093 - DNA, 1000 bp, Homo Sapiens
gggcagtcccaggagggggtcttgtactttagaggtgggtattcaggttgtgcactcgaggaccatgaggccatttgtgcatctggcagtggatgggagggacagcccgtgtttctgaggatggccctgtgggagtttgagtgtatgtgtgggtggtggggggtccgtgtgggagagaacacaggcattctgaggctcgtgcatgctggagtgaggaggatgtgtgtccccgggtgaaaggagtgtgtctgggacacatgcgtaagagagagagaatatgcgatggttcatggatgttacttgtatgtctgaggcaggggctgtgtggtatgatggattgtgcctccctgagtgtgtctgtgggtgtgaaggcataactggtgtgtgcgtgtgtgtgtgtgtgcagcacaaagctaaacccagcttcctttgagaaactgcatggtgcattggacattttcagatctgaactcctggcccccttatttctcctgcattcgagggacagggtggggtttgctgcttcatagtagcttccagacagacaaatagggccctggaatgcactgtgagcattcaagactctcccagcccccagcctgggcggaatgtccatcaggcagcagaggcagcagccctggtctccacacctgccaggtggaagcccagggctggactcaggaaacctagcttcaggaaggactgcggagtgcccttgggccaattgcttcccctctctgattcctgcccctgccttcccaacacagggttgaaaaagcacctgtgtgatgtgtcatgtgcttcatagaagccagggaggctggtgagggtagtggttaaacacaggcttgggcatcagtaagacttgggttcaaatctcagctccttcccgcctccccaccctccaatttttttttttttttttttttttttaagagatggagtctcgctctgtcacccaggctggagtgcagtggcgcgatctcagctcactgtaacc

SEQ ID NO: 483094 - DNA, 1000 bp, Homo Sapiens
ccctaatacgcgactctccaagtgcccccgcatctagggccttggaacgtgagccaccttcagggcctgggactccccgctaaacagcctgggtcccttcccccacaatccactcttcggagacaactggggacccccaccccggcccaaagccccgggtttgaacttgacatctcgggaacccttaacactggcctcacccgggccttctcaggcagcctggacgctcccggggacctccattccggtccccacgttcccgggacctggtttcctccctttaatccaggaaaccctcccccaacaaaaatctcaggacttaggccccccagaacaaagtccttctgggtcctctcccttccaggaccctctaggcagcccggtcacccccaggccagactccagggcgagtcccctcccaacccagctggcagttcgcgggtaacagaatccaagctattaccctcctcgcctttgggacgctcgctagggatggggctgtccccacgtccaggcctcagagagcggggtcccacttcaggacacccctccaggtgcctccaatacccgcccacctcccaccccgcaggtgtcccaggcgctgatccgctccttcagctccaccgcccggaaccgctttcagaaccgagtgcgcgagaaacagaagctcttccaggtggggggtcggggggggtggggatccgacgcgccagccgggagcgcgccgagccggggcaggcggggcgcgctctaaggagcagccagcacccctttctcatcagacacccccacatccaggaggacaatgacatcccgttgtacctgaagggcggcatcgttgacaacatcctgtaccgagtgacaatgacgctgtgtctgggcggtgagcgcagggcccgtctgggctgcgggggaggcggggctggacccagagtaggaggtggctggtttctgggcaggactgaccaggatctgggttgggggttggcgtttaggaagg

SEQ ID NO: 483095 - DNA, 1000 bp, Homo Sapiens; identical to SEQ ID NO: 309458

SEQ ID NO: 483096 - DNA, 1000 bp, Homo Sapiens; identical to SEQ ID NO: 309459

SEQ ID NO: 483097 - DNA, 1000 bp, Homo Sapiens; identical to SEQ ID NO: 309460

SEQ ID NO: 483098 - DNA, 1000 bp, Homo Sapiens; identical to SEQ ID NO: 309461

SEQ ID NO: 483099 - DNA, 1000 bp, Homo Sapiens; identical to SEQ ID NO: 309462

SEQ ID NO: 483100 - DNA, 1000 bp, Homo Sapiens; identical to SEQ ID NO: 309463

SEQ ID NO: 483101 - DNA, 1000 bp, Homo Sapiens; identical to SEQ ID NO: 120085

SEQ ID NO: 483102 - DNA, 1000 bp, Homo Sapiens; identical to SEQ ID NO: 309465

SEQ ID NO: 483103 - DNA, 1000 bp, Homo Sapiens
cccgcttccaacgaaatcctccaagctatccaaatatccacctgcattttccacaaaaagagtgtttcaaaactgctctatcaatagaaatgttcaactcctttggctgggtacacacatcaaaaacaagtttctgagaatgcttctgtctagtttttatgggaagacattccctttttcaccaaaggcatcaaagcgctccaaatgtccacttccagacactacaaaaagagtgtttccaacgtgctctaagaaagcgaatgttcaactctgtgacttgaatgcagatatcacaaagtagtttctgagagggcttctgtctagattttagatgatgatattcccgtttccaacgaaatcattagagctatccaaatatccacttacagtttctacaaaaagagtgtttccaaactgctgcatcaaaagagaggttccactctgttagctgagtacacacatcacaaacttgtttctcagaatccttctgtctcgtttttatgggaagatatttactttttcaccataggcatcaaagcgctccaaatgtccacatccagatactccagaaagagtgtttcaaacctgctctatgaaagggaatgttcaactctatgagttgaatgcagtcatcagaaagaaatttctgagaatgctgctgtctaccttttatttgaattcccgcttccaacgaaatcctccaagctatccaaatatccacttgcagattccacaaaaagagtgtttcaaaactgctctctatcaatggcaaagttcaactctgttagttgagacacatatcaccaacaagtttctgagaatgcttctgtctatttttatgggaagatatttcctttttcaccgtaggcgtcaaggcgatcgaaatgtccacttccacaaactacaaaaagagtgtttcaaacctgctctatgaaaggccatgttcatctctatgagttgaatggaaatatccgaaagaaatttctgggaatgctgctgt

SEQ ID NO: 483104 - DNA, 1000 bp, Homo Sapiens
gaattcaacagacacagcccacagcatgacttccagaacacctgaatcaaattactcctcaggatgataggcacatataataggagtgtaaccgggttgggacagcggcctcacagttgccttattttaggtaaagcaatggcagggaagaaatctttacctaggaaaccgtgtgcgtgtgtgtgtgtgagtgtgtttgtgtgtgtgtgtgggggggcgtgtgtgtgtgtgtgtttgtgctgggatgaacctccaagtaggtacttttggcagctgccatcatcctctcagcgacggaaggacaagaagtcgaaagtgcgctttctgacctgagaatagtcaatgaagtatagtatttagcacagcgtattttcttccctagtgagaaaggagagatccgtggaatcaaacagaccttccagcgataacctttccacgttgagcctattgattctctgtccgagtgaaattacctgccagtggagaacaagacaagtctttgcatgaaatgctcttgtggaagctagattgccaaataagaaagcatcaaatggtagaaacatgcactgaagtttgtagagatactcagtgcacaaagtagactgtgaaagcctttggggaaatcatgcaatccccgagagactaattgatgacaatccccaaatttatgtttgccagaaaagagagacggtcatgacactgcatagtgagcggtttcggacgtgcgacggcagtttaagaaaacacgaaacaaaaaacttgagaactcagaaggtatcccagctataaccttttgtttattaaggaattgatgaaaataaaaacaacgtatctcacagcatgtgtgataatatttccatacgtatgtgataatggatcaacgtttcctagagatgaaataaaaagttctaatttggacaaaagcaaacaaggaaaattataccgtagaaaagcccggctgacggaagtgaggcgctgtctcagggagaaacatcggaga

SEQ ID NO: 483105 - DNA, 1000 bp, Homo Sapiens
gtgtgtgtggttttgtttgtttgtttgttttttgaggaatttagttctgtgcttttttccataaagaactcctaaagctccattaagaaacccaatggtgctaccattttagccaattcatttccagttactgagcctgtgttggctggagtacagggacctgcacataggtagaaggaagtttaccagaatgagttcaaagtattgaagatgggtctctgaaaatctaaaacttacgagaactcttgaagtagtctggcaattacaagaagtaacaattagttggaatatacctgtggttattaatgccaatgttagatgaaacttatatacagtagaatcctcaaatgatagcaaaagtcagacgtgccagttatgtaataattagaggcttatacaccttaatgaaatttaatcacacttagaccaatagcattatagaaagcatccacactttataatattctaagtaacaaaaattcagtttagcagccgaagcaagcatgaaatgaggaaggaaaacaggaagagagctaatggttatgttttctgttgccttggggaaggtggggggggcctgttttaactaatgtgaataagcctctaaacacttcctgaagacttaaagaggggcaccagaattctttaactctggtgatacaacagtcaaggttaactgccttcatttaaatggcatgcctgcttcagtgtaccaattcagtggattctactgctctgtagctgcttcccaacgcacagaaaaggagtcatgtgaacaataattttaaaatccagaggcatgcaagtgaacatccattcagcattctctgccagcctagcccactatttccctacctaccccacccctcatctaccttttccatcccactttattggctagtatgctgcaacaagttactgatagctagccaagtctcagaaatcacacagaaggcctattttgcagttagtaaaagtgttagtttataagccagctaaa

SEQ ID NO: 483106 - DNA, 1000 bp, Homo Sapiens; identical to SEQ ID NO: 309468

SEQ ID NO: 483107 - DNA, 1000 bp, Homo Sapiens; identical to SEQ ID NO: 309469

SEQ ID NO: 483108 - DNA, 1000 bp, Homo Sapiens; identical to SEQ ID NO: 309471

SEQ ID NO: 483109 - DNA, 1000 bp, Homo Sapiens; identical to SEQ ID NO: 309473

SEQ ID NO: 483110 - DNA, 1000 bp, Homo Sapiens
taaagaggaggggaaactagtggggaaggctacagatctttacaaattaggacatatttttacaagttgcaaaaagtttgtagggcggtggaaagggtggaggcgtcaggggagagcatgagaaggctgagcagagccgggctgtggaaacgtagggagtgacttaccgtgaaaggcaaggagcagacggcgaaggtgatggtcatgatagccaggagaatgaggtggtccgtctcctccgccatggacaccctttcccctctcctgcgggccccggggccgccccggccactgcccagggaaggtccgcagcggcttctccggcttcggcggtgcatgcggatgaggttgagaatgacactgaagttgcaggcgagcaccgagacaatgagaagcagcagcagggtggcgtacagctgcaggtaagcggtccgcccgtgccggatgaagcaccaggtcccggggcagtactggacgtactgcccatagtccagcagcggcagcgagcagaagagcagggagactgcatagatgacaggcagcacggccaggcccccggaggccgagacgcggcgctggtagaagtaggggtgcccgatcgagaggtagcgctccagggccatggcgaagagcatgagcatcgtggccaggctgaagaaggtcatggcgaaagcgaagtaggtgcacgcgcggctctcgggcgccagtgccaccagggtctggttccgcgcgtacgaagccagtaccactgggctgatgaggcaggtcccgagcaggtcggtgaacaccagctcggtcaccagcacgtggaacaaggagagggagctcctgcggccggcgctgcaccccacgtccccccgccagcggcgcgccagcagcgccagtgctatgaggttccccagcaccccggccgagaacatgacggagctgatggctgggctttcgcctgggggaagccactgtcgcgtctcgcagtcctcagactgggagtcattggagg

SEQ ID NO: 483111 - DNA, 273 bp, Homo Sapiens
  misc_feature (97)..(98): n is a, c, g, or t
ggagtttgactggggcgttacacctgtctaacggtaacgcaggtgtcctaaggcgagctcagggaggacagaaacctcccgtggagcagaagggcannagctcgcttgatcttgattttcagtacgaatacagaccgtgaaagtggggcctcacgatccttgtgaccttttgggttttaagcaggaggtgtcagaaaagttaccacagggataactggcttgtggcggccaagcgttcatagcgacgtcgctttttgagccttcgatgtcggc

SEQ ID NO: 483112 - DNA, 1000 bp, Homo Sapiens; identical to SEQ ID NO: 309474

SEQ ID NO: 483113 - DNA, 1000 bp, Homo Sapiens
aacattgcatagttagggcagaagtcatcaatctggatgctaaatattatatacgtctccttcaacatattccagtttttttcccctatgtgatatatttttctaaaaaatcaattgcactgggttccaggatactcttgtgcaataagacttccttgattcatttgcacaaaattgtgccattctccttgagacacattttgatctggtcagtgtttcttgtcaacatctactccacaggcatggtcctggtcagaaagtgaaaaacgtatttcttcccaagagtacaagaaatgacctggcattgctgccagatagcagcagagctggaaaaggccagtacagtaaggaagacagcaagccatcaaatactgaaatatatctttcatccttccttcccactgaggccatgtctcatttctacctcttcctaagatatccccccacaccagcatctcccaactgttaaattgctgcataaaataccgatgttacaatgtatcttgttctcttaactaaaatttcttcattctagtccctgcctttctcttaaccttattacaatgatcacacgtcgaagagggagaatagtgtaagatcaagtctgcaagttaaactatagtcctgatactggaatccacaaacagaaaatctgaattatagataagcaaagattcagattctgaagcacagagcacactcttagatcttgggcatctaatatcctatcaatatttaatcaagaaagaagcaggcagatgacaggggtgggggggcaagcaagatggaacaataacttttattaaataatgactttgtaccaaaaacattactgacgttattacttgatccatataacaaataattttgggagtttagttccgccactaaactgtaaaagcattattcccattttatgcctgaggagtcagagctacagatctaaaaagtaattcgcccagtgtccacaggatttcaactcagatctacacaagaaaag

SEQ ID NO: 483114 - DNA, 1000 bp, Homo Sapiens; identical to SEQ ID NO: 309475

SEQ ID NO: 483115 - DNA, 1000 bp, Homo Sapiens; identical to SEQ ID NO: 120086

SEQ ID NO: 483116 - DNA, 1000 bp, Homo Sapiens
tttagaatggtgtcaatgctggttttgtggaatagaaagcgggggaaaggtggggaaaagattgagaaatcggatggttgccgtgtctgtgtggaaagaagtagacatgggagacttttcattttgttctgtactaagaaaaattcttctgccttgggatcctgttgatctgtgaccttacccccaaccctgtgctctctgaaacatgtgctgtgtccactcagggttaaatggattaagggcggtgcaagatgtgctttgttaaacagatgcttgaaggcagcatgctcgttaagagtcatcaccactccctaatctcaagtacccagggacacaaacactgcggaaggccgcagggtcctctgcctaggaaaaccagagacctttgttcacttgtttatctgctgaccttccctccactattgtcctatgaccctgccaaatccccctctgtgagaaacacccaaaaattatcaataaaaaaataaatttaaaaaaaaaaaaaaaaaaaaaagaacctggcagggcacgcaacccagtaccacttacctttggacctaaaccccacttccgagggtaagtgtctctctccatgatcactctcttgatcttggctactataccatggtcgcaggtagagatgaccgctgtggtcattaatgcaatagctacaggcattgaataaagaaaagaattatttgaagggtgaaagaattgataattgatgagccccaattctactgttgtatgccactttaaaacttttaaaactctgagctactactttaattggggttacctttgctcaggatgtgcatatggaggaaatactccattatgagaaggaggcctttgaaatgacgttaaacttctgaagttaaaaaacacctaaccaaagcacctaacgatacacataacaggcttgcagctcaagacgtctataagaacggcatgcacactccctttggggccacagaacctttgaagttttaaggattcc

SEQ ID NO: 483117 - DNA, 1000 bp, Homo Sapiens; identical to SEQ ID NO: 309477

SEQ ID NO: 483118 - DNA, 1000 bp, Homo Sapiens
cttggccacaggtctttattccaagaccctgtaccttcccagcacagggcccagtggaggccgcccttccagggagcccaggcccacgtggatgtgtcaggaatgctgtccccatcccacagggcacaaacctctcctgcaccgtgaccagtgctgactcagggcagcccgtctgccagcgcgctgttcagacagttgtagaggtagacatactgcttcagtgttggggtcataaggccacaggcctgagactgctgcagggccacgttaaagatatccacggtgcactcagaccctgcctgctgcagcagctgctccatggccaggaaggtgcccagctgggttgcacccttgctgcaactgacctagaggtggatgaggtacctaaagggggtgtggcgggggtgtccacggatgtgggaaaacccaacctgggcgcagggactgagaagggacaccggacacttggtcagccggccagcctggacctagggagggaggcggtaaattcccaccatattcctgaggacagggtagggtgtggagaagacaggggcattgtgagactgtgtccttttgacccataacccaagcagagcccagggagatctgaggctatgccagaagggcagggaggggcttccagtgtccgctcccccaagaccattgtccactcccccaagaccattgtccaacaacacttggagtggctgagcagtgtgcccggcttcttgttgttgccccgagagcagcactggcccacagcagccaggaagggcagcagggtggtggcgggcagctcatgcccaggctccaggtatggaaattgcagtctctgcacctccctttccctcctgctctccccatgtgtgaccctgaggagggtacagaaccagcctgctgtgctgctctcagccacccagtgcaccgtcaccatgtctgtgactacgggctgcatctccgttggccagaattcctatggcttctccatgacattggg

SEQ ID NO: 483119 - DNA, 1000 bp, Homo Sapiens; identical to SEQ ID NO: 120087

SEQ ID NO: 483120 - DNA, 911 bp, Homo Sapiens
ggcaattgtaaagcaggcagtttcttgctcatgccacacgatatgccttcattaaggtgtactctttccggttggtgtgagcagcccagatgaagagagcagaagccatgaactgtaagggagctgagacacaagccaggcagaaggaccatccaaattcaccggatacactgtcagggagctctagtttctggtggagtagttcaattccagcaacataacaacttactgagcccagtgtacacagacctgcaaggagatggagaatgcccgtggcaatggtgggatataagcttcggcaaatgcaagcacaaagtccgatcaaagccccaaagcacatcaaacctaaactcacaaaaggtaaaaggaactggcaacgccaaagataggtcctaaggagatcaatcccgctattgtggtttccgggatcaacaaatttctccatgaactgctcagttagtgtgaaactcacacattttgtgaccacatcaaatgactctgtcctttctggtgggctataccaatgcatgtttttgggtatggtgatacaccgtctccacaatcccactgtgccattgtatcgaaaaagtgcatcattataagtcttttcatctgcctcatcactaatgaattcatcccagatgcttttattcaaatcactggaattttcttgaactggacttcgatattcataccagaagtctgtgccaatggaggctgccatgtagatggtggaaatgaggctaagcacacaagcaattacaaatgctgtagcaaaacggttatccattctggcattcagactgctccaggatgctacggagacagaggtcttgttctctagtctatcaccgcccatcctcctgctccgccagcttcaccctctagctcagaccacagcaccctactct

SEQ ID NO: 483121 - DNA, 1000 bp, Homo Sapiens
tcagtggagatgaacattagtggtggccgaaaagtgttgtcgaaggtgctcttgcttgacacacttccaatgcgggacatagtttgagtgatagatggctaattcattgataatgtacttgttgccttgcagtcttgtgtactgctggctacctctggtctgtgtgccagtattgagcagcattcccttctgttctgtgctgttttctgagaaacggatgcaggaactgattccctttcttcctctctgtgtgctctgcagggtgctgcggggggcctgtgggggccctggggttgggaggctgagagcagtggagagacctggggatgtaggtgccggctccgcagggctagtaagcagttctgtggggaagcggggcagcagatggtatgagggtgagtcctggggagctggggacccggggcagcctagagcactgtcatcggaaggaacggggctggggcagcggccttctccgggtaagtaccgaatgcatttctttttcctcctgcacggaccacaccaatccgtctgctggttgaggccaaagcgagcacggcatttcttaggcgagccagggtctgtggtggattcttggtgcttttccctcgaccgcctcttcttcttcccgtagttgtcccgcgctgaccagcctgggtatagctgcatgtgcagctgcctctccttgcgggccagctcatagtacttggcctgctcttctcgcgacaacgcgtgccacctgcggcccaggatctggttgatggcagcgctctccttaagtgtgcactctgcaatgaccttggctctcatctccttcatgtacagcatgaaggcattgaggggcttcttgatggttggcttcttggcctccttctctgccttggactctgcttgtgtcttcaggttgcggtcgaagggctgcagctcctgcttccctgaggggggcacaatggccgggtgggggatggctgctgggtgaccaggtacaccagaacctagc

SEQ ID NO: 483122 - DNA, 1000 bp, Homo Sapiens
tcacatataaacagcttgggaatgtgaggagaggctctggaaaggaaaaggcagtaagactccctgtaaatgaattattactgctcctcgactccgccgacacgcaggccaccaagcccaaggtgagcaggatccacgcgcgccgcatattccccagggaccggctgctcccagccgccgcttgcaaccagggcaaaacgaagcctcctgcccagcgctcggcgcagcccgcgcacacgaatccggagcagagtagccgcagcgactgcggctcgggctcggagactcgggctcggggctcgggggcgctcgcttcctcctcctgcgcctgctcccgccgcccgcagctgcgccccgggaacgcggcgccctctcacttgttggtttctgcactcccgacacggagttggtgctccgggatggctgctctctgaagctcttcttgctctgctgtggttttgctcctccgcggactcctttcccgtgccgaggttcagtttctggttttaaggaataaattcgctggcttgaaagggaactgcggcagaagtttaggggcagagcggcgggagcgcgcgagccgcgcggctggagctccgggggtatctggagagcagcgcgtccaagcggggccactggctccgcggctgcgcccctcctcctcccgcgccgcgcctccctccccgggtcctcctccttctcctcctcttcttttcctccggctccctccctcccgagcctgcttctccgggctcccctgggcgactggggagaggaggcggcagtgtgactcccagataaacccgggagaaattctcgccagccttcaggcaaggccacacctccattgtccccaacagttaagtattcatcaaataaattggaattccagtaaaacaggaagtgcactccactgatttgctggttctcacagttattgctgtttactggggcacccatgtaacaagaagcgtggtgaatgctctctgattcagcttgg

SEQ ID NO: 483123 - DNA, 1000 bp, Homo Sapiens
ttttttttagctttcccatatgagtgagaacatgccatgtttaactttctgttcctggcttatttcacttaacgtcttccagttccattcatgttgctgcaaatgacaggatttcattctgttttatggctgagtagtatttcattgtgtagatgtaccaacatccacaatgaaatactatttcattctttagccattcatctgttgttggacactgaggttgattccatatcttggctattgtgaacagtgctgccaggaccatgggggtgcaggtgtctctctgatgcactgattccctttcctttggataaatgcccagtcgtgggactgctggatcatatggcggttctatttgtagttttttgaggaacctccaccatagtgactgtactactttccattcccacccaccgcatatacgagttcccttttctccccttccttgcctgagctgggcctttctgatcatctgtccccgtcccttgaactcttgatctggactgagggaagaagggtggcagaggcgagctggggagcagggaggaaccaggctgtcgcaggagaaacagaatatcgcgagccagccgtgtggaatggaaaggggaagccggtcttcctgccccacactcctgcctttcttccttaagggctcctttcctggggcagttggtcccttggcttggaacacctgtgcataccccactctgctgccgctaaatgaccgggggttacggtccccagcgccgtcctccagatgcggcttcttcaccctccctaaccttgatttcttcactctgccctcccctctccaggctgtgcacaactctccctgctcttccagtccccctgccttgggagctgccagtaattcaggggtcagtgactcccctgacagatcctgtccctccgaggacgatccccgggggcagaggcagccactccataattgcttgttgaagcccaatatgaaaatcaagatgaacaaaactgacaatac

SEQ ID NO: 483124 - DNA, 1000 bp, Homo Sapiens
gtcaagaattcgactgtgaatccatctggtccttgagtttttttggttggtaagctgttaattattgcctcaatttcagatcctgttattggtctattcagagattcaacttcttcctggtttagttttgggagggtataagtttcaakgaatgtatccatttcttctagattttctagtttatttgcctagaggtgtttatagtattctctgatggtagtttgtatttctgtgggatcggtggtgatatcccctttatcattttttattgcgtctatttgattcttctctcttttcttctttattagtcttgatagcggtctatcaattttgttgatcttttcaaaaaaccagctcctggattcattgattttttgaagggttttttgtgtctctatctccttcagttctgctctgatcttagttatttcttgccttctgctagcttttgaatgtgtttgctcttgtttctctagttcttttaattgtgatgttagggtgtcaattttagatctttcctgccttctcttgtgggcatttagcgctataaatttccctctacatactgctttgaatgtgtcccagagattctggtatgttgtgtctttgttctcgttggtttcaaagaacttccttatttctgccttcatttctttatgtacccagtagtcattcaggaacaggttgttcagtttccatgtagttgagcggttttgagtaagttttttaatcctgagttctagtttgatcgcactgtggtctgagagacagtttgttataatttctattcttttacatctgctgaggatttcttcacttccaactaagtggtcagttttggaataagtgccatgtgatgctgacaaagatatatatgctgttgatttggggtggagagttctgtasatgtctattaggtccgcttgatgcagagctgagttcaattcccgtttcttttttttcttcttaaacataaagtagcattccataggtttctttg

SEQ ID NO: 483125 - DNA, 1000 bp, Homo Sapiens; identical to SEQ ID NO: 309480

SEQ ID NO: 483126 - DNA, 1000 bp, Homo Sapiens; identical to SEQ ID NO: 309481

SEQ ID NO: 483127 - DNA, 1000 bp, Homo Sapiens; identical to SEQ ID NO: 309483

SEQ ID NO: 483128 - DNA, 838 bp, Homo Sapiens
aagaatcatattgaccagcaatcctcaactgcatccagtgcccagctaggagtcactgagaagtggactctttcaatggcagccagtgagggagtgaccctcttcagaacctgcaacaatcatgtttatctttggggaaaggtcagactccaaactccaaaatcaggacctaagttcactgaagggctcactattaatgattaaacgtaggtgggctgcagttttcagtctctcactctttttaatttttttcacccaatgaggaaactttaaatgttttcacttttgagagctaaaccaaaccagtctaccatcctataaatgcagaagtactgaggggcattcaaagaaaaaaactggtggtgatacttctttctgcttaatacataatcatcattatgcctgtaatagtaactgcctatattcacattacaatactatgtgggagggtagtaaggattctcaaactctgctaaacctaaccaaattttaatttttcttgtatggacatctttgaatttttatgctattataaaaaattcacactgaattttaggatttaaatttaaactgttaattcataccaccaccaatcacttcaaaataatgttaaagtagatagaactttcatgaaacatagatgattgtccttatgtgtgaaactgtatgaggttggagcaaatcagcattgtctgtcattagcacactagcaagccaattatttcatagtagacctctatttgtgtctgtgacaacacacatttgtctgagttcccaaacaggctggatgcagtcctgtcctttctgaatctcatttctaggaagagattaagagggg

SEQ ID NO: 483129 - DNA, 1000 bp, Homo Sapiens; identical to SEQ ID NO: 309485

SEQ ID NO: 483130 - DNA, 1000 bp, Homo Sapiens; identical to SEQ ID NO: 309487

SEQ ID NO: 483131 - DNA, 1000 bp, Homo Sapiens; identical to SEQ ID NO: 309488

SEQ ID NO: 483132 - DNA, 1000 bp, Homo Sapiens; identical to SEQ ID NO: 309489

SEQ ID NO: 483133 - DNA, 1000 bp, Homo Sapiens
gccagctatcctcttcagtattgtcagcctgccacatattccagtttaggaatttctcttaaacacaaagtactctagaaacttacaaagagcagccgggtgtggtggctcacacctgtaatcccagcactgtggtaggtaggccaaggcaggtggatcacctgaggtcaggagttcgtgaccggcctggccaacatggtgaaaccccgtctctactaaaaatactaaaaaactagccaggcgtggtggtgggcacctgtaatcccagctacgtgggaggctgaggcaagagaattgcttgaacccggagacggaggttgcagtgggccgacagggtgccactgcactccagcctcagtgacagagtgagaatcagtctcaaaaaaaaaaaaaaaaaaaaaaacttacaaagagctcagccttgaattatctagcccagttgactgtaccaatattcaagtaaaatagatcaagaagcatttgcttaccaatttctcaatttgatcttggttttaaagaataacacaaatgacagaaaacaactatgcattatggaacctttatttttcatgtgatttctgtacataaggagtatgagagtaacccttttacaaatggaactaatttactagaacaatgacaaaactgaactggtatttgatgtgaatccacaggagtttaagcttcaaatccagccaagaaatttgttacaatctctttcagctttgcatctgattgttctgagatctttccatcagccctatttggaaataaaagcaggtcgtaagttctgacctggaaaaagttttaatgactagcctaactacagatttgaaaataattttaacttcatatcttaaacataactttaaaaaaagatgccaacaattgcattcatacctgatagtgcccaacaaggcttggtgctggctgacgacatgagacaagaaagcattctcaaactttgtaatcttgctgggctccagtttatcaagatatc

SEQ ID NO: 483134 - DNA, 1000 bp, Homo Sapiens; identical to SEQ ID NO: 309491

SEQ ID NO: 483135 - DNA, 1000 bp, Homo Sapiens; identical to SEQ ID NO: 120089

SEQ ID NO: 483136 - DNA, 1000 bp, Homo Sapiens
cacagggtaaggtaccaatgagtacctgcttgactggatgggacgggaacttgaacacgaccagagggaaagaagtcaccaagtaggaccagagaggttagagtatatagtgtagcagagctggcctgaagtctcagactttgtacttcttttttttgtgtgttttgagatggagcttcactgttgttgcccaggctggagtgcaatggcaggatcttggctcactgcaacctccacctcccgggttcaagcaattctcctgcctcagcctcccaagaagatgagattacaggcgtgcaccaccatgcccagctaattttgtatttttagtagagatggggtttcatcttgttggtcaggctggtctccaactcctgacctcaagtgatccgccggccttggcctcccacagtgttgggattacaggcgtgagccaccgcgcccagctgtaattctcaatccagcaatctatcagctcacaaagaagggtttggcagagtcagaatggatctgaagcagcacagcagaaataaaaacagagctagggacataatctaggaaaaggttgggattgaaagggtggaggatggttgtcaaaaagggagattttctgtttacttgagatctgcagagtaggtccaagtgtcctcgtcgtaggtgaacacacgtgcacacacacaaatggtaactgtgtgtgatgatggacgtgctgattaatttgattgtggtaatggtttcacaatatacccccatatcaaatcatcacactgcataccttgaatgtatgcaattttgggggatcaattatgccccaataaagcctaaaataaaaaaaaattaaaaaaaaaaaaaggaagctcatcaaggtgacctgtctacagaggcaaggacagggactgagcttcaggagctctagtttgcctgctgggtagggacagatgtttaagttaaaagtctctgaaagaggcgggtctggatctcctggggagagtgtttggca

SEQ ID NO: 483137 - DNA, 1000 bp, Homo Sapiens
caggaggaaaagggcctttatttccatacatcgggtaaacaggggagagcacagcccagtgagtacaaaccaattgcaggagagaaggggggcggcagatgggagcagcaccaggcactgcacttgggctcccaagtctggtggagttctcagggataacctttttagggtgggggctgggacctccagaccacatggtgttgtgtctgggataagtgtgtgggggcagggaggttggaagaatgacacgggctcaggacacagagtgaggactcatgtctaatgagcaccggccaaaacttccatcttcagtttttctgatcacaagtcctcaaccccaagccttccctctcaagttgagtttatggtccagaccacctggacagagcaggagggaggcagtgcttggatcagccctgaactgctgtagttggaatgggtttaccttaaataggtcattgcacataacacgctgagacaaagagggtggggtgggggctggaggtgcggatggtccacacacacacttgtctgcgtaggcttgctcaacccagcccagcagcaccggagagcccctccgcacctcattcttaagaacctggacccggctctcctcaccagcgtctccagctgcacagagaaaggactgctctctgaagggtgaagatggagatgacattcccgagtcgttcttgggagccccagctaccactacagccccctcccactctcagggatgcagctgtgatggagaggttgggtatttaaattaaaaagtagaaagacagcaggcaccaagaagagagagcccccaccccacacgagagggaaggcactgcttctcctcccccaatcctccccatggacccagcaacctagagtgtcccagtaggcaacctgtccaccgtccctgagcagggagctgagagggaggtcaacgtgctggctccatgcagtgccaggccacctgccactgcccacggtgacacagggtagaagc

SEQ ID NO: 483138 - DNA, 1000 bp, Homo Sapiens; identical to SEQ ID NO: 309493

SEQ ID NO: 483139 - DNA, 1000 bp, Homo Sapiens
tttcttgcttaactttgggtttcttctttgggttggattgttaacttcagaagagattatagccattctttcaacttttgttctgccctcaaggcattcacacacatacacttcacttccataagtaacacttttccacaacatgccatcattttcaagtctctcatcttctcctcctctcccattcccacatctcttccccttattataggccacaatcaatctcggtaaccatgttccacatagtgggcggcagcagtgagattgagctgagatcccagaaaggtaaaaggcaaaggtttagggtatggtgcttgaacagggaacgtttcctaaagaaggtggtaagtctctgtctgagaaggatgtaggaatggatagggcagaagcttagtgatattagaagactagcttgattacaaaatggaaagaagacaggcaagaaatgaggccactggaataagcagaagggtcttgaagtagaatgtcaggattccccatcatgaaactccttgaaacagaacagtaattactttaaacagcttaagcagatagattgcttcattattaaaaggcacaaaaataaaggtttaaactcacccgcaagatttcttcaacacagcttggatcactgggaaggcttacctgaaacaaaataaacagaaaacattaggcacaatctacttcttcttcttgtataatagtttactctgtaggacaaactgtaaagcaagaaaatctagctatcatttttttcctattaaatacaaaagaatatctgcaaatgactaattttgttttactttaatgaagcggtaagatcgcagtgcatggtgcagaaataaagtgactccttgttctgtcactgatttgctttcaggcactgacccatcccccatcccctggggcttctctttgctcatctatccaaagagagcttgatctcgtgatctttaaggcatctttgaccctctgacatacttttgtatattattcatta

SEQ ID NO: 483140 - DNA, 1000 bp, Homo Sapiens
ttttaaaaagtgatgccaataaagcaactcttgttgagagaaggtaaataaaaataatattaaacatttgacaatagaactgtagaagataaagctctgtcagtgtgatgtggtgttttgtaaagatctgtctgcttgtgagcaagaactggaaggtgataaaaatgaaaatcagttcattaaagagtacaggttttgtaactttaaaatcttgaacgttgctgttccatcatctatttgatatttcttaagggacgagttattcaatctctgtctcatctgttctaggcacagcgacttggacagtggcaacaccctatggagtaagacacgcatgccggtatctgtgtgtattttgttttaaagactcactttcaataaaaattatttttatattgctattctgaggggcaagagagtctagattttatggcactagaagaccaaggccatttttgccactgagaatccagttggaagattggtataattaaaataagacaaacaaaaatgcaggaaggaagagaactgacctgtcctgggatggaaaaggtgctctgctcagagtgtccagcagtatgcatggaagtgagaggagtaggccaggaatgggtcatctcctaatgaggaaaaataaagaaactttatttcagggcaattaaaaaatcaagccctttcttagcactaaacagtgtaggtcctttataaatactaacttaactgacctaatacttaaggtgaatttaaagtcatttggaccatccagcagatgcttgcaaactgccagtgacagggagcttgctactgcttgaagtagcctgctccatgttgagacagcatcatcaggctattcttccttttttgtgagttaaaaacttgtcccccaggaacttctacttatagactgtactttggagctgcacagaatgcatcttctccttcttttgaatgacaagccttcagttgttggaagatagtaatcctatcccctggcatcgtc

SEQ ID NO: 483141 - DNA, 825 bp, Homo Sapiens
  misc_feature (540)..(540): n is a, c, g, or t
cagagagattatcatgtgcagatacagccactgacctttctaggtgaatctactcacacatctgagtacccagttctccatcagtaactccagaaatgtactggattaaaagcagaggaaaagcaaaggccaagaaaatgtttcccaaaaaaggaagcagaaagcccgccatatggggacaaggttttagggcagcctatgatacttggcaacaatatcctcataagaagtaatctttttaccagatgtaattagcaacccatcatttaccatcatttcccagttgctcctgcactttctcaaagtccgatccgcctaccactccgattttgatcttctgcctcaatttttgtaggaagtcatccatttctttggtaattttctaaatttcaagaaagaaaatacaacagtcataagccacacaataatcaggagaccaaaactctaagggtaacacaagtacataagtcttattttcttatttaaaaattaaagaaaaaatttttttttgagatagggtctcacttgtcacccaagctngagtgcagtggcatggtcatagctcatcgcagcctcgacctccctggactccggtgatcctcctatctctgcctcctgagtagctgggaccatagttatgtgccagcacacctggctaatttttttatattttgtagagacaaagttttgccatgttgcccaggccagtctggaactcctgggttcaggagatccaccagccttggsctcccaaagtgctgagattacaggtataagccaggtctataagccttattttcatacatgccaattaagttaccagct

SEQ ID NO: 483142 - DNA, 1000 bp, Homo Sapiens; identical to SEQ ID NO: 309494

SEQ ID NO: 483143 - DNA, 1000 bp, Homo Sapiens; identical to SEQ ID NO: 309495

SEQ ID NO: 483144 - DNA, 1000 bp, Homo Sapiens
ttatgagccaagacgaggtcttttcctgggggacgattcttcttcttcatcttcctcttcatcatctggataatccactaagccaaccaaacttcccttggtggctgttactgacgtaggcaagtttgtggttttggaagaggatccattagaagttgctggtggtatctgagccactacagatttactgtttgttccattagcagcactggcagagtgggagaaagtaaatttgaagccaccaggagatgtccttttgggaaggttttccttgtcttcactttcttttgcttttttagtctccataaacttttcataattatctggaaaatcatcttctggcttaggtttttccactggtgccacaactgcttttccttcctcttcttcatcttcattaaaccacatttcttcatcctcttccaaggcttttgcatctctgcgaaatctgttactacgcaatatagatggtacactgttcagtttctgattttgtctgtctttttcttgctcatatttagtcttcaatcctttgaatgtctgaacatattcaatcgattcaagtgctttataaaagttttcaactatatgggcagtaagagacttgatatcttccactcttataaattcaaacaactcaataacagctgaattcaacagattataccgagttccattatccagaagtgcatttataactggctcaaaaagatttcccttggtgatgtaacgattataaaattcatctttaagtccaattatccgcctcataaagcgaagggcacacaaggccagaaaagtgtgctttgaattcatcaagaccaagactcttcttagcaagtccttgttcataatatagttttttatgtgatatgtgtgatgttccacacaaaatgtgagtaactctaaaattaaggcaagtagctgtgctgtttgataattatcgggacaaattgtgttgtttttgtttgatccaactatattatcttgagagatggag

SEQ ID NO: 483145 - DNA, 1000 bp, Homo Sapiens
aaccattctgagaatccctcacaggcagctgttagactcagatgtttataagggagagcagcatcattctgttcaggtataggtgggatcccctggggaagagaaaagggaaagcaccatgagtctaagacaaaacagcttgtggtggttggtggtggctgaggagcatgaggggtgggaggcagctaatacactgacaggtgctcactgatggtaacatcgaaaatatatgcacatgggctgggctgggcacggtggctcacacctgtgatccctgcactttgggaggcctaggtgggcggatcacctgaggtcaggagttcgagaccagcctggccaacatggtgaaaccccatctctactaaaaatacaaaaattagccaggtgtggcagtgcacgcctgtaatcgcagctacttgggaggctgaggcaagagaattgaacccaggaggcagaggttgtggtgagccaagacagtgccattgcatccagcctgggcaacagagtgagactcctcaaaaaaaaaaaaaaaaaaaaagaaaggaagaaagaaaaagaaaagagaagaacaagtggagtcactcatctgtttcctaccacaaagggcaatctgggtcaagagtaagagatggcctcccaacaccagccaggcagattttttttctgtaaggggacttaagccattgtcagtcaccttgtggaaaagtacaagttctcccacagatcatccattaaataactaatgtatctctagggaacctcctttttcccagcaccttcaagcctaattgcaatatcttcatacatctataggatcatctttagattctaaaaataatttaaattggctatgtaaagtatatgcaatgcagcatttttatatgagggactattggaaaatcaaacaactgctaatctctagtataagaaggcagacattttttcttttagaatagtatggaattttcccattatgaaaacacaaacatggctgggcaca

SEQ ID NO: 483146 - DNA, 1000 bp, Homo Sapiens
caatttcataaactgcaacacctatacaaaacaaaattaattacttgcaatgtgtgagttataatgacttaaggaaactatttgtgcaatgtacctgaaagccactttctggtggcctttccagtctattattatagaaatattgcacataaggataaagacatgagattcccattccagatgacaaagataacagccgcattatcctgcatgaaccagggtaactcttgctatacaatccacttgaagccttgtttcaacattacagagggaggcactacttaaatttggaaaaaaggaaataatttcaaaactacctgttaaaacttagaaagtaacactcctcaaacttactgccaatcacaactatgaattcctggtgccaaaggcaacaataattttgaaagtagtcatcctatcttaaaaggatttataataaaatatttcaaaacattccccagaaacagtgaacaagaaatacatcacaaacagctactgtaccgcagatacaggttcagctcaattgtctggggaaggtaaggttaaagtcacaggaaacagctggtctcagagtgatgtgtgcaagcctttttcaaagacaaacttataaacagctcctcacaagccagacatcacctgaattctaaaataaacatttttattaactgtttccatcattttcaaagattgaaaaagtctgatgtcaagatcttcaaaaacaactttccatttgaaaaaaggctttatgataaaaaaaaaaaatggttgaggtacttagtttcaatggagttaccagatgaaatgtagttggtaaacaacagtagtcagcactggggtgagacccatttaaaaacaaccctacctggtgtttttattgtaattcaagtttgaaataccgaggagctttttcacagaataggtttaaaaataaaaccataacaattggcaagggtagtccatgtgttgcgggtctacgaattctaactctcgagaatggtgt

SEQ ID NO: 483147 - DNA, 1000 bp, Homo Sapiens
cagctttgaacgaccttaattatactacccactccttaacttatttaaaaataaaaagtctataattacacaatttcctttagaattattttattaaatcataaatgtacaacagcttcttaactctacacacgcacttaaatttttttaaaggaaaaacgttatgtcttattacaccatgatcctggctaatagcttttcaaaactttgagaaaaatcttaaaaaaggtttcacatgtcacctgaaacttacaaatttaacattatcaaagaaggaatgcttctacactcttacaaagaccactagaaagaaacaacaattaaaaagctaagaaactgtctcaaaggcatttttttttacaatccttcctccacagtaaggtaatgttattaaataatccaatccattcacaaaatggctctctgcatctgctctggtgtcttctgccatatcactgcatatttatgcatgactgagataagagtttccttaacattgttatttcgataacctgaagctgttctgttacctctgggctctcatcctctcctatttatacagtgaagcctgtttcaacagaagtaaagggtaaaaaaaaaatgggttatgaaattatccatctaaccagattttaaggaaagataaccatgatcctaaaaagcttttactcctgcagctatgtctcccaagataataataattgtaaaactcaaaagctacttacccatggcaaataggaagaagctcagtatcggctcctcccaccataacccccacttcctccactgcctcctggaccatagtttcctataattgttggaacagcaagagaaaacaaacttactttgatttcccatgatcagcctaacactacagttgattctattttatatccatccagtcttttaaacaagcagatcctaatcctttgcagccagttagcagaattactcaggagataaattactcgggttcatagacatttttatttcgtggctg

SEQ ID NO: 483148 - DNA, 1000 bp, Homo Sapiens; identical to SEQ ID NO: 309499

SEQ ID NO: 483149 - DNA, 1000 bp, Homo Sapiens
ttttcaaaatttaactttttatgagatttcagtttttgaaatacacaactcttacagcacaaacacagtatttacatttcaagttctttgtacaaaagatgtatgccatttgggaggaatattgttgagatcatgatctaaaatacctgtcagagttactcatggaatctgctcttcacaaatccattgtattatgacataaaatatggctagacgccaaggtttaaccatacataaaaatactaattctcggctgggtgcactggcttatgcctgtaatctcagcactttgggaggcagaggcaggtggatcacctgaggtcaggagttcaagataagcctgaccaatatggtggaacccccgtctctactaaaaatacaaaaattagcagggtgtggtggcatgcacctgtagtcccagctactcagaaggctgagacagaactgcttgaacccgggaggcggaggttgcagtgagctgagattgcgccactgcactccagcctgggcaacagagagagactctgtctcaaaaacaacaacaacaacaacaacaaaaataattctcagtgattggcaaatgatggcctgagggtcacatctggctggtgggcagtttttgtacagctgcaagctaaacatggtttttacatttttagagggttgtttgaaaaaaaacaaactaaacaacagcaagaagaatgtatgacaaagacacaggtggcctgcaataatttactaaccagccttttacaaagaaagtttgctggcctctgttctatcaaaaaccaactgagagagatagctactggaatataccaatgagtattaaacaagacaccactgtaatgtgccagtgccatcagcactactcatttctaaaatgaggcacttctgtttgaatatgtacatttccaaaacataattacatctggtaagtagtactaactctagcctgttgaaattagacctgcacgtgaaatcatagcattcttagggg

SEQ ID NO: 483150 - DNA, 1000 bp, Homo Sapiens
ttttttttatggtacctagatgatttcctttttattactggaattaaatatacttaaataacatacagagcttaatgaaaaagatcatgaatcactccaccataagaattatcaggacatgataaaatcttatgtatcttaatggtaaaaacaatctgattattaggtctttgtttgaggcagtttatctacagttcaaaaaaatgctttcactgattacattccaaagtatttctttcattgtcagcaggagtgtctggcatttaattaaaatatattcctctaactataaataattgaatggtttaaatctatggctaatattggcaaaccgataaataaccaaataatgtaagaactagaattatcaaaacacttttgcgaacacagttctgcttggagggctccacggaggaagtgcctcactttcaagaaaggaatgacgtttcttctgttttcgttcaattctttcttgtttttccttattttccagccatttttcatattcattaatagcttgtttatctttatcttttttctcagctcttttcagttcttcctttcttttctcatttattttttcttttttcttttgcttgaaaaaagcttcctttttttcattccatttctcaacagcagttaaattatctttctttttctcggcaacagtttcctcctctttctgtttctttgctctttcatattctctctcctttctatttttctctttaagatattccatctttttctctttccatttttcaaaagcttgtagtgcttctccttttcttgcagcattttcttcttcagttttcttcttgtttttttcttcaagcctctttttggcagctattttctttgcttccttttctttcatagccttccaggcctcaaatgatgctaatgcttcttctcttttagcagcttttttctgttcattttggatccttaagttttcactttcaattctttttattctgtgcatttcatgtaaatatac

SEQ ID NO: 483151 - DNA, 1000 bp, Homo Sapiens; identical to SEQ ID NO: 120090

SEQ ID NO: 483152 - DNA, 1000 bp, Homo Sapiens; identical to SEQ ID NO: 309501

SEQ ID NO: 483153 - DNA, 507 bp, Homo Sapiens
tcaatccatggcagccagctgctcgccaaaagtggcccactaggcactcgcattccacgcccggctccacgccagcgagccgggcttcttacccatttaaagtttgagaataggttgagatcgtttcggccccaagacctctaatcattcgctttaccggataaaactgcgtggcgggggcaacgtctctctgaccagtttcaaaaattcacccagggttaattcttcaaactgcttcttgacagaaaggaaagcgcaaccggacgaatgctttttatgttcctctatggggtcgtcatctggctcccacccttccagctccttgaagcaaaaaacccactgggccaagtctggctcgttctcagtggggcagtggatgaagccagcctcggccatccgctccggggtgcaggcgcagccctccaagaagggccagttcttgaatgtagagatgcggtggtccttgagaaagggctgccaggcagggggcaacgtcggggcacccat

SEQ ID NO: 483154 - DNA, 1000 bp, Homo Sapiens; identical to SEQ ID NO: 120091

SEQ ID NO: 483155 - DNA, 84 bp, Homo Sapiens
gatgagttcgtgtccgtacaactggtgatggtcaaaggcttctgcagaagttaggcgctgtggctgatttcgataaccgggcta

SEQ ID NO: 483156 - DNA, 1000 bp, Homo Sapiens; identical to SEQ ID NO: 309504

SEQ ID NO: 483157 - DNA, 1000 bp, Homo Sapiens; identical to SEQ ID NO: 120092

SEQ ID NO: 483158 - DNA, 1000 bp, Homo Sapiens; identical to SEQ ID NO: 309507

SEQ ID NO: 483159 - DNA, 694 bp, Homo Sapiens
ctaggagaggacaatttgccagaaggatttcttcctggatagattctacagttggtctgaaccaaaggaacttggaacaacatagatagtaaggggagaagaaaggtgggggaattggagcctctcccttgggtataaggtttaaatcagtatttggttgtgatctagcatactaggtttagagaataagtctgaaaactggacttccaggtaaaggtaagaagagtatagttgccttctagctggaattttttaaaaaaggaattgaaagctgaagaactcactgagatataggtatttgccaggtgtgcccatccaaacaagtctacaagtctgtacaggctggcaagtttacagcgagtaagtttttctcccttcacatatgaggatgtatctgcaccaggaaggtcattgataggtgtgaccatgccaagacctaaaagagcaaaaaatgtggagagagatacgagtcatgcaatcccttacctggaaattagttgccaggaagtagcctgctctgggagtatcccagccttgtatataataatctgaaatttatcagcccatataatattttattagcttattctccttcagagaggtaaactgagagtaaaaataagtatcagctatctttgattgcttagtaaagttgcttcatgtgtgcttgctaaggagtgactatatccaaagg

SEQ ID NO: 483160 - DNA, 867 bp, Homo Sapiens; identical to SEQ ID NO: 309508
  misc_feature (198)..(199): n is a, c, g, or t

SEQ ID NO: 483161 - DNA, 1000 bp, Homo Sapiens; identical to SEQ ID NO: 309510

SEQ ID NO: 483162 - DNA, 1000 bp, Homo Sapiens; identical to SEQ ID NO: 309511

SEQ ID NO: 483163 - DNA, 1000 bp, Homo Sapiens
aattctcattttttgagatggtgtcttgctcctgagctcaagcgatctatcccaccttggcctcccaaagtcctgtggttacaagtgtgagccactgcacccagccatgtgaagactttcttttaacaggtctctaaaatgccagtctcaggcaaggtggaaagaaaaataagttactttatttctgctgctctgaatgtctaggcttcactgagcatgcatgtgcaaggttaaatactgtggccagtctcactaatgatcagttctcataaacaaattcagaacataagccgctcagcaaacctcttccatgtcagaagagatgggctgaaaggcaccttaattttttctggtaatttcacttttattaagggataaacctgggggcaaacatcctctgtgccatgcaaaggccattaatccatctcaaaccccatcccaggatgtagctgggaggccttttgcaccacgtgacacccctcagctgcaggcctacccctatgcaaggtcatggcacttctgagttctaggactttctgcccaaaggcattattaggtgcctcatgattggaccctcctggagtacaggggccttggacattttgcaaatcttgcctgccttgctgttggaacataggaaaatgtgagagaggaagcagaccaagcccctgccctggattctatttatggggcttaaccagtgggcaaaatgttttctcagttactgatacttggtatatacatggacctttttaaattttttaattttgtttaagatgggtctctgtcacctaagctggagggcagtggcatgatcagggctcactgcagcctcaaaccccctggctcaaagtgatcttccgtctcagcctcccaaagagctggtagcacaggcgtgcacccccacacctggccaattaacaacactttttttgtagggatggggtcttcccatgcttcccaggctcgtcccactgcagctggatgtacatgggccttc

SEQ ID NO: 483164 - DNA, 1000 bp, Homo Sapiens; identical to SEQ ID NO: 309512

SEQ ID NO: 483165 - DNA, 1000 bp, Homo Sapiens
caagtgacatctttcaatataatctctaaaactctatgaattgaacagataaaatacctctgggctattttgttacaaaatatttgccatttggattagttgctgggtgcagccaccctgcctttccctagagaggtttctctctcatgggtgacgggtgtgcggggagagggtgcagcaggagttatgtacagcaaaaacagggacggacagacagatggtcatcagggaagcctagtgggtacaaagagactcctggcgggccgtggggaccggtggcacaggggctcgaagacgcagggctggatcaagacacctgtgcagacgggcaggcaggcaggcaggcttccaggacacgctgctggtagagcttgcttcagatctaggggtgggacttgtccaaaagtgggtggaaaactagtttcatctcccattcccgactctggagttggggccgaatggatcaaatcaggagagggacccagatttcccaaaggtctagagagtggatagagtggggccatcttggggtgactgggtctggggctcagcactctactgtccccgcaaccttaggagagcaggaaggcccgagagcaccccccaccggccctctgggggctggaggccctgccctgtctgctgccgtggggagggagcaagaggcttttcctaggtccctgaggtctaggctctggggacagggatggagaggggtcccaaccttggcctggggactgagcagggaagggaggttacagatgttgggcacttgcttcccctgacaatgaggagggccagctgtgtcctgccccaggccctcaggggtgttaaatgcccctcccagctcaggactggctccacggaatactgaccccggctgggctgcttcctggacagactccctgtgctgcccgtggagcccagggcagccactgcaccaacccacggggtgggcctctgccctggggcaggggcactgaggtgcctgagagtccgg

SEQ ID NO: 483166 - DNA, 1000 bp, Homo Sapiens
  misc_feature (559)..(559): n is a, c, g, or t
  misc_feature (768)..(768): n is a, c, g, or t
  misc_feature (988)..(988): n is a, c, g, or t
tttttttttttttttttttcagcttaaaataaatttattgtgcaatacaaaatgtaggcatactggaaaataaaggtacattattaaatatacaaagcaaatgaaagctaaacaacacaaatgttttcatccaaacactaagataaaatgcaacatttatgctaaaaacatgccaaaaaaagaaagaaaaaagaaaatcaaatatgctacattgtaaatgcttgaatatcaagaatcaataatggcataaaacaaacccaataatagtggtactatcaagaactttgtttaaaaaggtgttaagatactgaaagaatcaaaatatgtccttaaaactggcaaagttttttcttttttaagtttgagggcctattcgcagtatcttatctcttcttccgtttatcttttctataaaaatttctgctcattcttaacattttctaaacacagtagcttagataacagtacttcatttttaagtatgcatttaaagcattaccaacacaaaaatagtaagtgacacaaattaacaacctaattttgaaatctatacagctangtatacgatatgaaaactaaatcttcatttaataaagtaaaaccaacttcggaatgaaatggtaaaatgtaacaatttagataataggggaaaccacaatgccttttttccaattaaggcattcggttgcccaaactacaaatggccctggtgcaactaacataaatatgcaacacaaatatgcagtaaggccttgagaagcatccagnttaggatatgcatctgaacattcaaagaacattcaagtaagcataaaatccttgggaaaatcctctacaacttaaaatataattatttaaatatataaatttaatacttaagttagcccaaaaggctttttggccagcacctctagaagggaatttcttttcttaatatcacagttcccaaacttaagacattatgatcaagattttctatctttatttncactagtatcta

SEQ ID NO: 483167 - DNA, 1000 bp, Homo Sapiens; identical to SEQ ID NO: 309513

SEQ ID NO: 483168 - DNA, 1000 bp, Homo Sapiens; identical to SEQ ID NO: 309514

SEQ ID NO: 483169 - DNA, 1000 bp, Homo Sapiens; identical to SEQ ID NO: 309515

SEQ ID NO: 483170 - DNA, 1000 bp, Homo Sapiens; identical to SEQ ID NO: 120093

SEQ ID NO: 483171 - DNA, 1000 bp, Homo Sapiens; identical to SEQ ID NO: 309517

SEQ ID NO: 483172 - DNA, 1000 bp, Homo Sapiens; identical to SEQ ID NO: 120094

SEQ ID NO: 483173 - DNA, 1000 bp, Homo Sapiens
tccatcccttcccacacacctcttcctccctccctccccacacacctcatcttcctccctccctcccaccccacacaccacctcttcctcactccctccccacccaccacctcttcctccctccccacacaccacctcttcctcactccctccccacccaccccttcctccctccccacaccacttcttccctccctccccacaaacctcctcttcctccctccctgcccacccaccacctctgcctccctccctccctccctacacaccacctcttcccgcctgcctccctcctgacacacttcttccctccctccccacacaccacctcttcctccctccctccccacacaccacctcttccttcctccctccccacccaccacctctgcctccctccctccccacacaccacctcttcctccctccctccccacacacctcttacccccccctccctccctcctcaccatcagagaacacggagtcactcagatcggtttgcaacacattcattttattgtcatcaacatgggaagcaccctgctggtgagatctctgaggtctggcagctgggcctaaacttagttgctgctcagggagataggggagtagatgggcgccccttactcagtggttcctccagctcgctctcctgactcagggggtcgtgctgggtcccctcgctcactggctcctccggcggcagctcgtgctgagggagctcctggctgggctggtcgctggggccgggtgccgctggcccgctctccgcctcaggtgccgtcacggccgccatctttgtcgcagcccctttcttcccgcgtctccctccacgaactgcttctcccttctcggccaccttggtagtctggaaggacaacagggagatcacagaagggctctggtttagggacgaggatggaggaggctgggaacagggacgtgtcctcagaagcggtgggggccgggttggggggttgtgccaagtgaggacagg

SEQ ID NO: 483174 - DNA, 1000 bp, Homo Sapiens; identical to SEQ ID NO: 120095

SEQ ID NO: 483175 - DNA, 1000 bp, Homo Sapiens
tgggagagaatttactgtacattaaattgtttattttttgttactctgtagccagtcattaatctgaagatttaatatatcattttattgggatgagatcatagtctttacacaaatgctatgcaaacaagttactgaatatttttcacctcgtggagttgtacacaaccttttatatatacacaccctaccttctctcaaatgctgggcttacaggtttattagctagggccttttgaggtatgctgtcaggcgacagcccaatgagggtgctcgctggcaaggcccacgcgtccagtcggcggccgaggggcagccaggggcgctccctctcctggacgtcacccgcctgccacacccccgctccttcatgaccgtccactgtgcttcgggcgtccttgtcacttgcttcctcacgttgaattttatgagcttcgagagcctgatttctccccgacccctcctaacacggctccttggcaggctgaggtgtcgcagatccccggtgtcccctgggccccaatggcacctggaagcccaggatctccgggaggcccaggctcgccgggagcaccgtcctggccgtccttgctggtgccgggcacgccttggggtccttgggcagagcagaaaggtgagttcagctgcagcccggactgaaagcagggggacttgacatccagctgtgggcaagccctgctcttccatctgctcactcttcacttggggagaggccacagcgggtggggaggccgagggaacggcacacaaaggctctccgcggggctggcggtcgggagtgtccggggaaggccaggcgcggccagccccaggcaggggtgcagagccgtcctgaggacacccgcactctgacttacgcgggtttggtgggggctgtgtgagtaaggagtggatttggagtgagcagggggcccggagtggggggttgtggggtggctttggtgagtgatgacagtggaaacatgggaggcctgggtgt

SEQ ID NO: 483176 - DNA, 1000 bp, Homo Sapiens
agtatcaagaaataagtatatgacttcccagggtaatcattttaggggactatacacatctgtaagtacaggtgagttcaatgtgttaggggaaagggaaagtgtaaagaaaaagaaattgttattccaaaggctctggggagagatgaagcttgctacttttgaagaactgaaaggtcagcctggttaaaacacagtaaacaagtaggggtggaatggcatgagcccagagaggcaggcaggggccagggatccaatttttcatcagtaaaataaaatcatattctgctctgcccatatagtaagcagttataagggccaagcacattattataaactgaaaaataatgtatactcttgttatacttgtgttcaaaaacatagtttcattattctctatcattgtgaataatccagacactatgggtaaaaattatttaagagggtatttgccagagattttaccataataaacatacataatacacattccaactgacaaatacaaaatctagatgacacatcgtcaaggactacataaaaatattttaggtagcctgatgggaggaagactaatggtcttgaattatggttaataagaggattaataaaacaatctagattagaagatataattgatggtatgtgatctcatcttgcattgaaagtcaaattataagatcagatttgtcagaataatactctttttggtagaccataaattgataaaacgaagaacttgaagtttggtaaagagataaatcactcatttagcatagtatgaacggtccattgacctgttccctcctggcttatttcttagccccactactcacttcgcacttatactcaatttccaaaatgccaaactgataacactcctagtgagtacccctggttgtttcaaaccccagggcctttgagcaagctgttccttctgcagagaatactttccctcttgcactttgcagctcctgctaatgccctggtccatctggcc

SEQ ID NO: 483177 - DNA, 1000 bp, Homo Sapiens
tctagattttcaaattaaatactacagttattcattaggcctctccattattatttttacattattattttatatcagtaattcttttttctttttttgttctgtattttgtttatgtcttttctccctttgataagtcctgttacagagatctatatagctaattaatctttccaaagatccaccttttagttttgttactggttttttaaaaaattgatatttcattgatttctgtttatatctttattttttaatcacccctttaaattctctgggttttggtctgttgtgcttttttctattttcttgagataaatgcttagctttcttacattttaatatttccagtctccacataaatgtatttaaggttacaagttttcatctaaatactgagtgagctatgtcccacgcatttttgataattactattttcattgtaatttttttctaagtattttaaaatttcttttctggtttccctttaaaaccagagtgtagtttagtaatatgtcactgagtttatttagaattttaggctattctcttgttattcacttccaattttatttcactatggtcaaagaatattgtccattatgatattgaacatttggaatgttttgaggtttgtaataaccatatatggtctttttttttttttttttttcgagacggagtcttcctttgtcatccagtctggagtacggtggcgtgatctcggctcactgcaacctccgtctcctgggttcaagggattctcctgcctcagcctcccgagtagttgggactgcaggcgtgagccaccatgcccagctaatattttttatttttagtagagacagggcttcaccgtgttagccaggatggtctcaatctcctgacctcatgatccgcccgcctcggcctcccaaagtgctgggattacaggcgtgagccaccgtgcccagctcatatatggcctattttaataaacatttcatgttttctttaaaaa

SEQ ID NO: 483178 - DNA, 1000 bp, Homo Sapiens
aagcttttttccacaatacctaccctgcaagaaatgagaggcattttatttcgggattgaaatgaaaggacactggacagtaactttaagctgaatgaagaaataaaagacctctggtaaaggtagatgcgtgggcaattataagttatgtttttgggcacatgatgtgtagatattaatttgttacatcagtaactggaaacaggtaggaacagagctwataaggaagcagagcttttgtatgctattgaagtaaagctggttatatcaaatatactatggactaaatgtattatgagcatacatattacattttggtttaatttattttctctattgtttttctattcttgattttatttatctctgctctaatctttattatttccttccttctgctatttttcagtttagtttgctctttttctagtctctaaattataaacaaagactaaaaataatttttacacattagccttctaaaatatgatccaaatatatgctgtctacaagagactcattttagatccaaaaatgtaaatagactgactgaaagtgaaaggatggaaaagttaccccatgcaaatagtaatcaaaagagagcaggggtgactacactaatattagacaaaatagattttgaattaaaaaagttccaaaagacagggcaatgacatattaataaagttttcagtacagcaagaagatataacatttttggttcttcatttcctatattactgtccttttttgtatttagtttttgtactgaaatgcttttttgtattgaaacactttaataattctattctcatccctttgtggttattatggggattacattagcatcctaaagttaacacctgaatttgaatatatgccattgtttatttgagatcttcttgtttttaatgtgtttacagctttacatttctatcatcacactgctttcactcattccataagttttggtatgttgtgtttccattttcgtttgtct

SEQ ID NO: 483179 - DNA, 1000 bp, Homo Sapiens
tgaaaaacttattcctcctgtctaactgatactttgtaccctttgacaaacacctccccatctcctccacttgcctgcctcttgtagctatcattctactctctttttccatgagttcaattgttatagagtccacatgtaagtgagatcctgaagtatttgtctttctgactgagtctggcttatttcacttagcataatgttcatccatgttgtcccaaataatagaattttctttcttttaaaggctgaatattattccattgtgtttgtttgtgtatgtgtatagaaatgctactgatttttgtatgttgatttaatattctgcagttttaccaaatttgtttattacttcttatagttttttggtggagtctaggcttttttacatataagatcatgccatcagcaaacagagagaacacacacacacacacacaccagattttctttattcatttgttaatggatgaatagattgattctgtatcttggctattgtgaacaatgctgcaatgaacatgaaagggaaggtatctctttgacatattgatttcatttcctttggatagatacccagaagtgggattgctggatcatatggttgttctgtttttatttttttgaggaaactccacactgttttctatagtggctgtactaatttacaatcctaccaacagtgtacaaagatttccttttcccacatcctcaccaatgcttatcttttggctttttgatgatagccattttgacaggtgggaggtgatatcttattgtgattttaattagcatttactaatcattagtaatgttgaacatttattcacatatctgttggccatttttatgtcttgtgagaaatgcctattcagatcctttgtccatttttaaaaatcaaagttttttttttgctattaagttacttatataatgtggatattaaccccttatcagatgcatggcttctaaatattttcttccaatctgtagtctgtct

SEQ ID NO: 483180 - DNA, 1000 bp, Homo Sapiens
ggtcaggagttcgagaccagcctggccaacatagtgaaaccccatctctactaaaaagacacaaaaattagctggggatgttggcacaggcctgtagtcccagctactagggaggctgaggcaggagaattgcttgaacctgggaggcagaagttgcagtgagccgagatcacgccactgcactccagcctgggtgacagagcaagactctgtcgcaaagaaaaaaaaaaaaaaagatcctgagttctggattctctccgtgggacatcctcttcagaggccatctaactcagtgctgctcagctgaactttctgcagtgatgttttatatgcactagctaatccagccaccaccagtcacatgtggctatccagccttggagatataacaagtgagacagaggagttacatttctggctttatgtaattttaattggaagagccagctgcggttagtggctaccatattggccagcagaggtctccactatctaattacctatcatggaagttggagaaaaacaataagctcctttggttaggtcttagtatgtgcaggctaactgacttctttacttactgtgttatacttttgcatgcagcattttacaggaaaggaaacaaacagagccttactccaggaacatcacttggtaattaagagatcgccttgcttcagatccttgctctcctagccacgtgactgtgagcaagtgactttgcttctctgtgtctgtttcttcaactataaaataggtatgaaaacagtaccgacctcacagggttttgtgaggattaagttgatacatttgaaagtgcttggaggccaggcacagcgactcatgcctgtaatctcaccacttttggaggctgaggaggacagactgcttgagcccaggagtttgagactagccggggcaacatactgagacctctgtctctacgaaaaatacaaaaattagctgggcttcgtggcatgtgcctgtagtcccagctact

SEQ ID NO: 483181 - DNA, 1000 bp, Homo Sapiens
tacacagagaaattaggtgaccacagatggaacaagctcagaacaggtcacccaagcccccactgccaccctcttccagaccacaggaaagagagcgtggccggagacagaaacaggacaagtgaggaacctccgagctctccatcgccagaccaacttccccaggacccgggcctgagccgtcgctgggcccgtcgccttccccggctctcggccccgccacgtccccacagggcgtcccggtggccggcgaccgctcacctgcgctggacacagtagcagcaggaggaggccaagggccaggccgcgagcggtcatgctgtggccgcgcaaggctgctgacgccggcggcgttcggctggttgggctccccggaggcggctctacttccccgggctgtttcagcaccccgcgcaggaggagcggaggagcaggagcaggcgctgaccgcggcagcaggctgcgcgcgccggtcaggaaggaagaaggcgtcgtcggctccgccctttctgggaggtgccgctgccgggactccctggcccgggctggggcgccgccgcgaccccgcttcaaggtccccgtgttgcccttctcctcagcccctgcaatccccgggggccaggcgcgggacttatggagtctggctcggcccgggagagtatctgtggagttgtgccaacggtttctggccgtgatgctttcccttttcgtctctgggttggagggggcgggcgaggtttcagcgaagggtagtgctgttctgggggacttccgggtaaggtcccgcccggccgcggagtctctgtttatttcggctccgacaattacgctgagcgacttctcctcccaacccagtcacctgaaaggaatctggaccccggcactttctagcagagcccggggcggtgacgcgcggtggcctgaccgtgtgacgatccgcgagtgcggcggggcggggcggggcggagcgcggggtgggcggtggcggtgcggccaggcc

SEQ ID NO: 483182 - DNA, 1000 bp, Homo Sapiens
gctctcgtcctcagactttaatttcatgatttagaagatgcagacgttattgcctaaatattattctatacatttccatcagtgttcaggaaaacactttacttgctacttaatttacatcataatcactgggttacagctttagctcattggcaattttggaagcaatatttttgaaggctatggatgtccccgatatccgcttaaaccggaccccgttcagagacagtcttggcagcttgcacacttccatttcccactgcacgaggttctccgcgtgcccatctccgtggacgcagaagagcaagaagcgctccctctgctcatagtcgcagttattggcgtccaacactttgcggatttcccgcatcatgtccccgggatccattgaactagtggttttcatgctccaggtgaagcgtagggatcgaggctttgcttctttgttttcatctttttgctcagcagatacattgcgactccttgtgagttttgaagttaatttactaaagagattagtggagcctcggcttcgagtctgggacaatggtgtggcttcatgggacaggctgggagaggcaggagggccattatatgttgcggttcgccgttcccggggctggccgtggaaagtgctacgactggcagtgcctcttgggaagcggattcgatctggggtggctgcactactgatactgtgtgttgaagcaactggagttctctgatcaggaatagtgctgttttctttgccattctgaatcactgagtgtctatcagctgtagttctctcactgcaaacataagtatttcgtcgtgtcattccaccagatgctgtgttactactagggacagtggagcttttcttgcgttcaggaatatccgccttattaggattacttgcattcccaagcatgggactggctggagcaattccctttcctccaacagcactgccacttgatttccgggaggaaattccatcttctttgaggtcaccatc

SEQ ID NO: 483183 - DNA, 1000 bp, Homo Sapiens; identical to SEQ ID NO: 309520

SEQ ID NO: 483184 - DNA, 1000 bp, Homo Sapiens
tcccctttctggcactgtgtatgttgcaagaaaaagtccgtgctctggtggcacccacagtacatgggaggtgacaatacacaggtctgtgtgaagaaaggcatgtgaggcaggtttggtggctgagcatgaggggaattaaagtaggtcaaggagggcctcagagaagtggcattgatctgtggtctgagtgacaagcagtcccctcagagatgatgtcccccaggagaggtaggcataagtctactggatcggaggtatttcatgtcttaaactgatgtgaacctgggtatttattgtactttgatcttagctcactgcagccttgacctcccgggctcaagcaatcctcctgccttagcctcccaagtatctgtaactacaggtgcgccccactgcgcccagcactgttttttttttttgttgttgttgttgtttttgagataagtctttgtcacccaggttggagcgcagtggcgtgatcctggctcactgcaacctccacctctcaggttcaagcagttctcctgcctcagcttcctgagtagctgggactacaggcacgtgccaccatacctggctaatttttgtgtttttagtgcagactgggtttcaccatgttagccaggctggtcttgaactcctgggctcaagtgatcctcctgcctcagtctcccaaagtgttgggattacaggtgtgagccacgcctggccgtgcactcttctttaagacttttcctgtggcagaaatattttgtgacttttgaagacggccagcaagtgccaaggtccccgttcagagaatctgagtgccaggtgccagttgtctgaaccattacctcacttgtccccctcactacggcctgaggagggcactagcgcgacgacgttagccctaagagcagggacactgaggctcagcgcatcacccaaagccacacgaagagaaatttcaagtgctcaagggccagcatggagttggggacaacagggcagcgag

SEQ ID NO: 483185 - DNA, 1000 bp, Homo Sapiens
gagaggttaaaaatattgccaagcttggtctagtttagtcaggatagcgtatgttatcgtgcagcaacaaataaacctgaaatccccacggcttagcacagcaaaggtttgtctctccttctggtcccaggctgacatcgacatggcggtggcttaggcctccaggctcctgccatgtcatgaacctgtacaaaaatgcatggcttcagaggaggacccatcctaatgtaggtaatctaggctcatctcatcttaatccttactttaattagatctgcaaagaccctcattcttttttctttttttttttttttttttgagacgagtctcactctgtcgcccaggctgcagtgcagtggtgtgatctcggctcactgcaagctctgcctcccgggttcatgccattctcctgcctcagcctcctgagtagctgggactacaggcgcccgccaccacgcccaactattttttgtatttttagtagagacggggtttcactgtgttagccaggatggtcttgatctcctgaccttgtgatccgcccgcccgccttggcctcccaaagtgctgggattacaggcgtgagccactgcaccctgatatatatatatggaaaaggctcccagaccatatttctctcccttcatgctttgagaaccagatgccagctgagttacaagaagtttaaaactcaagaggtgctttgtgcgtcaggggactttcccagagggcagccccagctggagtggagaaatattggctttgggtctgtctggtcagtgggcagaagcagatccaatgctcaagatcaatttcctgctgggaaaatgtgaaatgaatggggagtgtttggaggggaagaagcaggattcacatacacacatgttttcagttcccaagtggaatcatatggatagatccattttatatctagagctcaaggagggccacaggtgttacttagtgcctgacagagcttgccacgatcttggactctggt

SEQ ID NO: 483186 - DNA, 1000 bp, Homo Sapiens
cccaaatatttttgatccatgtaggttgaatccatcgatgtggagcctgcggatgcagagggccaactgtatctattgagtgccatgttcttttacatattttctcattttcaccatgtgacgttattataagaatgtggaagctaaggctcaaaatgcctcataaactgcccaaggtcacttgtatatatgatggcactaagatgtaaatttgctaaatcagcctcgtgagcttccaaaggcctaaccaattccactggaacatggtatttcttctctcctgggtgggggactcagcaggcagagaaggcatcattgatttacagagaaatatcactctgttgctgtttatcacagacctcgggtgatttgtctaacattcacatacctgcctggctctggtaggtgtttgacctctgaactctcattctctccattttggaagtaggaggcaaaggagcgtaggcttgggcatagtgtgcacagcaaagccagcctggagctcaccccagggctgctcttcactagctccagcatccagggtcggataccaagggctcagtggggctactccttgccctcctattgcaggtgactggctgtgactagtgtaatttcaatctaccttggtagattaaccccctatagaatccagtttccaaacttgctccatttaaggggaatggtccaatttctcaacaatttctaagcatctaatgggagaattatcttcccctcttgcccagacacgtaaggaaatacaaaaaaatacagtatctcctttcaaacagaaacaaaagcaataacaggttaaaaaaaaaaacctataaagcttagagccaagaatccaaagctgaaaggagtaatttggcccctcctacactcttcctcatgaggtgctgctcattctagtcctgaaggacacaggacctgcaaacccttactcacatcctcagaggagaccaacaattccagatgctctccttccttccctcaggct

SEQ ID NO: 483187 - DNA, 1000 bp, Homo Sapiens; identical to SEQ ID NO: 309522

SEQ ID NO: 483188 - DNA, 1000 bp, Homo Sapiens
cttttttcggagatggagttttgctcttgcaacctccactcccaggttcaagcgattctcctgtctcagtctcccaagtagctgggattacaggcgcatgccactacgcccagctaatttttgtatttttagtagagatggggtttcatcatattggtcaggctggtctcaaacccctgacctcaggtgatccgcccgccttggcctcacaaagtattgagattacaggcatgagccaccacgcccagtctgatttctttttgacatccattcctgctttaaagcagtaagttcgctagaatgtatgctcccctgctgtcccctgctgtaagcctggtgctggcacataaccagcagtcccaacagtataggatgaacatgtgtctctacacttaccacgaccttgccccctggaccttggctctggacggtgacccccatccactgatcttccttgctttctgacgtggggtcagctgtagaaaggagcatagttagccttccaagtgactgcacatgctagaaaccatcactgaacaaaaatacaagcaactgtttccaaatggcctcgactctgagtctagctactcaataaattcagttactcaatccagaaaaattacttgtcatctcaagggaaacagagatgtggtttttggaatctttcaaacatttgaaacataaagtactagctctatatagttgcctattttgtccaacaataccctttgccctctcttgatacctagggtcctgaatgcagaaggtaagtgaaactgtaagactaagggagccctccaaaatacatctcttaaggcaacaatgtaaaatctagtattccaaactgcagctaccatccaaactaacaaaaaaaatgggtacttctctatatactccccaatttttttatttaacagcattaaatgttctcttctttactggagatggaagaaaaagaccagatttactttaggatcttgtagctgacaatgtatcaatg

SEQ ID NO: 483189 - DNA, 1000 bp, Homo Sapiens; identical to SEQ ID NO: 120096

SEQ ID NO: 483190 - DNA, 1000 bp, Homo Sapiens
aactaatattattcctttcacactcaaaagctgttggtttgaattataagctacaaaatcactttaattatagttaatcaaactcatgcatgtgaaacatcttcctttgtttctgggtgtcagtatcagaccatgtaattcagaaacaaatagaagctaaattcatacacttttttttgttctcaactcatgatcatataatagtctgtagagctctattgaactctccttcaagactggttctataattcttggattcttgcaatgaagaacagaggtaaaccgaaagcatgtgatagtatgtaactcttttagacatttaagaaaacactggttcacaacagtgggccttagttgcactgagggcctgttatgtgtcaagtactgtgcctggcaccttctacttacaatttcatttattcatcataagatctcagtgaggcagaaattaccatccttgtgagtggaggaaactaagtctcagagagtttaataactttcccagggacatatggatggaaagaaaacaggacgcccagttcataaacttcatttcctgggtacctttcaagcagaggaaaaatcagtgagagacagttatgtgctcctggacataaaggcctaaaggcaccctgtgggagtgacactagacaaagaagctcatatggtgagtccccttccaagttttacctgtgagcagggctagtgttcacgacatctaacaaacaatatggcagcagtgtgcatcgatgagagtgggcacaggccgagcacaggagatggcatgtctggggttgtactggcgtgccccagcacagagccttggtcctaagcctgctcctgagagagggctcttgtcctgcatccactgctgcgtgaacccagggaagggctggaaggtaaaggagaagatcatggtaccttggccacgatcagggacagggttctgatgaagctccacttcttttttttttgagactgagtctcgctcttgtcgcca

SEQ ID NO: 483191 - DNA, 922 bp, Homo Sapiens
  misc_feature (149)..(149): n is a, c, g, or t
  misc_feature (356)..(356): n is a, c, g, or t
  misc_feature (692)..(692): n is a, c, g, or t
actgacggtcctatcctgatgcctcttaacctgcccacactcaagcccaggttatggggagacagcctgacttagctcagaagcccgctgggagggaaggctggaaggctcccagggctatcaaacatcgggaatgctcgagggcaggnagagggcagctaagtctaggataaatgactgatcacgtttcccagatgatgatgccagtgtggacacggtctctggggacacgggaggtctgaggctccgtggctgctgctcaccgaccctgcgtttccctacagtgggtgcctgcaccaggctgtctcccgccccatgaggggaaggcccatggaagcactgggagatgccttccnatatctgggaacaagattctgtttccccacacctgaaatagtttccagcggccattctgaccaaagtgcggcaactggatgggcggcttccctcagttcccctcacaggagctcagggctccgggcccagcccttcatgtcagtggggtgggcaccacctctcccaggcttttttttcagcttaccttccacgactccacacacgttggcatacacatcgaggatctttttcctccggctttgaatctgtgaaaaagagtcgagaattttcatctccagaaaggggcaacagtagaaaggaggcaaatcctccatgtcagcaggggcaggcagcanctacgcccaacaccagagacgctgcacacagcccccgtgtcagcagcccagccctgacacacagggaggagggccttcttcaggtttcctattcaaacatttttggggtctaccacgggtgcttcttaggctcagctgggtggtcagactcgtaagatactttggggacacccctggcatcagtctgtttgaaaagatgaccatggggaccccacttgccctcaggacat

SEQ ID NO: 483192 - DNA, 1000 bp, Homo Sapiens; identical to SEQ ID NO: 309529

SEQ ID NO: 483193 - DNA, 1000 bp, Homo Sapiens; identical to SEQ ID NO: 309530

SEQ ID NO: 483194 - DNA, 1000 bp, Homo Sapiens
  misc_feature (890)..(890): n is a, c, g, or t
gagctcgaattcagcagaaagtgtacttcaaggacccatgaaaccattgtgtttttcaccttcagtacagtagtcaataaattgcataagctattccacattttattataaaataggctttgtgttagataactttgcccaactggctgctacacaagcaatgaaatcttcagtctagtgatctaaaaaatatttttggcaggatttccaaaacatttatgagctgtgagaatccaagtttccaagagcattgatactttatggatatttttattccaaatgatagatggatatttgtttgccaggtgatgctgtggtcaggggctgtggtcttcaatactctatacagaaaattcaagggcagatcttcttaaaaacaaaacaaaacaagacagttcccctggtctccatcatcttcgttattttattgtattgtgatttgataccactaatcttaattttcctaaatattgagagccacccagtactccatgcaaactatatagctgtggtatgtctgtagtgaaagacagcagggcaaggtcccccccaaatttaaaagaaacgaatatccaactataaaaaactagaaacatcctgtctgtgaaaacgctttgtgatgttacattttttattatcacagaatggaacctgtgttttgattcagcaggttccaaacactctttcgtagaatctatgaagtgacattactgaggccgttgaatcatgtaaaacaaaaaacaaaaacgtatatccagctctaaaaactagaaaaaagctatctatgaaaatgatttgtgatgttctgttttatacgacagaatggaatctgtgttttgattcacctgttttcactctttttatagaatttatgaagattttcagggacncaaataaaggacctaaaaattactggttttccttcttttgatgagaaatgcattatgctcttttaaatagaaacctccatttaaattacagatgatcctcaatttatgat

SEQ ID NO: 483195 - DNA, 1000 bp, Homo Sapiens
acgaggcagaggagaagtcggaggagtcggagccgggcgagccgggcgccgaggggcccaagaccgagcagctggcgtcgcaggcgcccggggcggcggcgggcggcgacgcgccgtagaagtagctcaggttgagcgggctggtcatgaggccgcagccgcccgccgcgtcccgcagcccctctccgccgcggctgtcgtccagcagcttgtccacaatcatgctcccaggctgggcgctcgaggaccccgacacctgcgccaccggctcgctgcgcgcggctgcctcccgggctggctcagggagctgtcggcgggcggacggcgcgggccagtacgggcgcggcgcgggactgccagggtatttaacgggccgcagcgctcgccgacctccccggcgcccggcccggccattggcggtgcccgggccgctcccagcccctcctccggatgcgtccgatttccagtaaaatgtacaggatgaggcaatgcgccctccgccctccgccctcgccccgcccgcccggctccgcccagaccgaccggttgtttgcctgcccttcaccgggaaaccccgacagcgcgcggcttccagcctcccgcttcccgcctcccgcctcccgcctcccgcctccgggaccccgtccctcgcccgggccatccctgccctctaggcccccgccgggcctgggcgcccggggagagggcgcgcggcgcagggctgggcctgcagagggaggcgggagtcagtggagggaaccggttggcctggttcttggggactggcaagtcctggaaggagcgcgccccgcacccctctgcctgccccggcgcggcgagctgttagcccagttaaggcatctctggaaggttcttaagggcctgtctcctccggcgccccagcgtagcctcccttctcaaacatagcgtttgtcgacggttttaggcaacatcccgaacctcgagagttcagcatcaggccaagaaagccaaaaggtga

SEQ ID NO: 483196 - DNA, 1000 bp, Homo Sapiens
aaagcgaaaaacaaaacaggttttaatggttaaaacagatgaattaataggtttataataaccattaactaagggaagccctagaacaagaaataaggatttttaattgcatgcaaaacctagttaccataaaaaccaatgcaataccaaaatatctcagcttcctagcatagactccaggtcttttcatttccaatacttggcagtcataatatgtacactttcatatgcacctggttgtggagggataagctcattcacataggactacaaatatctctcacaggtaggagggcacaaaagaacaatatcttcctccactttttttgggtccatcttgaaaaacaaaaaaggcactcccaaaggttccttggtaacacctttgttagggtttcttaattactaacataatctttacatgtaaggttaatggtccacccatttcatagatctggggaaccatcaggcattggaactgcctttaactcacatgccaaacaaatggctttcttaaacaatgacaaaaactgtatacttgttttaaaaacatttgggctttgtttccttgacaacttatatatgcttaatcactgggactttggcatgcagagccaaacatatcatggaactgaaagacccacaatatgacatggtgacagaagactctttgaatcattattctgttttccactatcagctgctccagctcccttatactaatccaactttgtccctcagagcacccatgctctgaacctaggtttaatctctctgctgaaagatttattaaagatacttagataaattaccaagtctttctctacgatcatcaaagagtaagggaagtcaaatgctcatgggcagttgtccactattcacagaatctttagaaactatttgcctgaggccaaggagaatttgctttatcactaaatctgacccatgttgagccatactaaaactgcacttgggtactagtctcaaatcaaattgagcttat

SEQ ID NO: 483197 - DNA, 1000 bp, Homo Sapiens
gtagcggggcatggtgacgggcacctgtggtcccagctactcgggaggctgaggtaagaggatcactggagcccaggaggtcacggttgcagtgagctatgattgcgttacagcatttcaccaggagactgagcaagaccttgtctcaaaaaataaaaagtaaacacatggatgaatgaatacaatttaggatgattccatttttattgtcattatttattcggtttttagagacactaagcgtgttaaaaattgtcgtctttggaatacaatgccggtttaaggggtctgtgctcctgccctctgtgcctccggtcttgagtagtgatggtgacacagcaagggtgggggcttggtggggagaaaacgcctgaagcaactgctctgggaaaggagagatcagagccggagtaaagatcaggatgctggggactggggctcctgggtctgagggaggaggggctgggcctggactcctgggtctcaaggaggaggggctgggggactggggctcctgggtctgagggaggaggggctgggcctggattcctgggtctgagggaggaggggctgggggcctggactcctgggtctgagggaggagggactggggcctggactcctgggtctgagggaggaggggctgggggcctggactcccgggtctgagggaggaggggctggggcctggactcctgggtctgagggaggaggggctgggggcctggactcccgggtctgagggaggaggggctgggggcctggactcctgggtctgagggaggaggggctggggcctggactcctgggtcctgagtagagagaggagggcctgggcagctgacgaggtccatcccaccgtgaagaccatcatttgtcccgcatcgtttcctcaatccagcttctgtacttgcacaggttggtgtagacaccggggtagccaggcagggcgcagcgctccattccccaagacacgaggccctggagctgtcctctgcac

SEQ ID NO: 483198 - DNA, 1000 bp, Homo Sapiens
gcccgcggggtcccaggaccccaggcccggaccaaggcggcggaggggacgcccagcaagcccgcggggttgtgaccttcacccggacgcggactatctactaaggaccgagctccccgggtccccgagtccgccccgcggcttcccctcgcaccggcccagggctctctcagccccttcccgatcccgggacagagggcgcagggacccggcgcccgctccgctcggacccgctggggaccgtcccgctcctaccgccgcctcggcccccgcctgccccgccccggtccgcggcacggactcaccgccttggccagcgccaggcgccgagcgctcagcagccgcgacaggccccggacccccgacatgtctgctgttgccgccgcgcagtcccgccagtccctgcgcagactgcgcctgcgcaccacaccggggtcgagctggcgggggaggggggataccgcgcctgcgcaccacgccggagtcgagcggggctgcagtgggggacatcgcgcctgcgcaccatgccacgcccggagcgggtactgagtgggggcgccgcgcctgcgcaaagcggacccgcggacggtggcgttaagggaacgctgaggtcccgcgctccccgaccgaggtagagcgggccctgttccggggaggtggtgggcaccaacatttttaaagccccgtgggtggttctccgggatcgcccagaccgaagggcctgaacgcccagaccgcagggaatggggtcggaggggggcgctcgtccgcggaggtgggcgggagcggcccggggcctccgacctcttgtttattatacatcccttgattaactaaactattttgtaatcgtgtgtgtttgtggaggtcacatgtaaacaaacttaaagtgactctactttgtgaaaatgtgaaacttcgtgtaggtactcagtaaatcagtaaattcttactaacgttagcccccagcctagctatggagggtgcatgctgagcccga

SEQ ID NO: 483199 - DNA, 1000 bp, Homo Sapiens; identical to SEQ ID NO: 309533

SEQ ID NO: 483200 - DNA, 1000 bp, Homo Sapiens
ctgaggtggggtgggggaagaggtatggtaggagatcgacgggttaacaagagcgtaggctgcacgctacctcgcctccactcctttttctagttcaaatgggatctgacttctcaaagatcccatttgagacttctcaaagatcctatttctgccccgggcgtggagatcaataagggaggggaagggagcctgcgcagccgccacagggccctggaagggctgggataccagccctccctcaaaggcaccgctccggttccccgcgtcctccccgcccaccccctcggccgcatcctttctccgtgcgcgcgccagatcccaggggtgatctgcagaagctggctgaggctttccttccgccctaaagtgtctcccccgggctgatgacacacaaaagaatttaagtagctgtgcgtgtcggcaccgccgcatcccgcctctctgcggatgcccctctcccgaaatgcctcggggtgagggttccccacgggaaaacccttcgcgtaaggaaggcaacctgtccccgaaaacgaaaccgccgcgttttcctatattggctctcccagagcttcccggactgcgctgaccagcccgaacgcgagccccagagagaaatgcaattcggcccagggaaagtgggacgccaggggcgggggcagcagtctgggtccttcccagcagaggcaatgcggagagcttgtggggcgggaatcgccagccccaccggcgtccccgcggcgccgcacaccttagacacggcccgcgcctgcagccaccagcgtgcgcgctcacgccggccgggccacccggcccaccccgcggtcatctccagcagcagaaacgccggaccgttccggaatcggacgtagcggggtggagcggagagcagagaaaaggagggggaacgcaacgggctggggaggggggagcgtgagaccgccccagagccgaggcgaccccaaatgggagagcaggaagaatgacagggagactcgga

SEQ ID NO: 483201 - DNA, 1000 bp, Homo Sapiens
ggatccaccaggtgggtgtatgacaagcaatccaatatttcttatatttgcagtggttttaatctggtaaatcaaagtatggacatctgcccatatgtgaatattttccataaccttgaaaaaaatgatctatgacctgaggtttttcaagaacaattgactagccgtaaattcttatgccactaattttagacaatatagtcctcctcttcactaacacaatagccctagacttatttatatttgctgtgtggtatgctgccacatgcccagcagacacacacacacacacacacacacacacacacacgtcttacttgtagaacacaagcaaacaaatgaatactctccagtggcacattatagcttttggaataaagtccagcaactctgcacaacattaatagccatttttgatattcatattttccttgtctccccaagttctaccttgcactcataccatattgaaaaaactagagttaccttaaactacattatctagtttaaatctcctctactatctacctggcatgatgtgttcttacttccttggctactcatccatcattcctcaagaatcagaggtaactacctaaccaaaaaacaaaatacaataaatgcaactcccctgctttggttagatttcaatgcttcattctctctgaactccacatcctatgtgtacacttgttatttctctcttctttcccttgcctgcccattccccacctctcttcctttcagtctctcttttccagaattacataggtcaaactcatgagaattattcactgtgccagatttactattatgtcacgattctgtagtatagtatttttaatattgcaggtttttgataaaatgatgaattaataaagaagtaaattttgaggttagcaaaaaaaaaacaacaacattgatgtgtcaaatgcaacacctggttctaatttttgtgcctgtaattccttgtatgactctgaaaatgtatttaaatttt

SEQ ID NO: 483202 - DNA, 1000 bp, Homo Sapiens
  misc_feature (155)..(155): n is a, c, g, or t
  misc_feature (475)..(475): n is a, c, g, or t
  misc_feature (533)..(533): n is a, c, g, or t
  misc_feature (550)..(550): n is a, c, g, or t
ctcgaggatctggcttcacattcctcggcccttcctcgatgctgctgaggatgatgcccttgggctggctcatttcccatggctgacactaacacccaagacttccaccaggattccttccctgcccatcccacccaccaccctcacattttggnccaaaagcctcttttgtcatggacaactgggccagctttggttccacagtctgagatggaggaggagagctgtgctgatgctggggtgggcagagtagcctgccagacacagagtaccactgtggcatgaggggctctgggggagggagagacctccagggaagggcaccagggaaactagatgctgctcactactgaaaagaggcaccagcaagcacggacaggaatgacgaccacacccccgacctgcacatgcacagaaagctcaagcaggtaagtgcgcacctacagacacacacacacactcacacgcacgtgtnagggcatggcacgaaccaggcacaacgggggacgcacctcggcacatgcacacacggntggacagacaaagcggnagattccgtctccactggcagtctcccggcagcgtccatcccagggaggaggggaaagcgcggctcagagctgcctgtgagaggggctgcacttctggttcttccgggccaccttggtgtgctgtgggctggtccccgaaggaaaccctcagggcagcttagcactggcaacacctcggttcctccggcccctcccaagcgcccctgtcatggctcctggccacgtgccagatgcaccgggtttcgcgggacttcccactacaaccagttcgaggtgtggcactgagttctccacacaattcgctctcagagtctccatgccattaggaggtaaatagaaaaggtgtctgtctcaaacccaacatgggagtgagcgagtctctcccgggctctgtccctcttgcgggccagggctcctgtccacagagggctgggcagaaacgagaggta

SEQ ID NO: 483203 - DNA, 1000 bp, Homo Sapiens
atcattcaaactttttaatctccctttacacattatattaacattcatattgcaaggcattccattcacaaatattacagtttgataaaaacttcacacacatactcccaaagtctataccagattcagtcaactttactaaatcattcaaataataaaagtaatgaaaacattattatattttaaagcaataaggtctgaggcactctgggaaagatgttctcttacaagtataatgtgtcagtggtatgaaattatattacaaggatgcccagtaatcaagtacactctaatgacaatgactttgtgatttgatatgtcttcactggatacactcctacttggacaactgctgaaaggaacgtagatatggggcagctgaggtcatttctaatgaggttcccaactatgtaaaggagaggtgtgtttccacacacgaaggacagctgcatctctactgcaaggttacagtacacaaaattcctttctcatcactatcacatttactcaacgttagattttaatagcccacttgacctcctgggttcacagctggagacactttagaactctttccccatcctccaccatagtgcaaacttcacgcttctctgagcacctccaaggtatgcccttgaagtaaaacagaaaagggaagaaagggggctttttcttttccatttctgaccaaacagaggtctgaaatagcagtgtattatgaaattctcattccctgcaacagtcagccaccacttggaaaatggctatttttgccataaactagatttttaaaagcctgataaccttccaaagtgaattttactacattcattcactgacacacagagtccacattggagaaagtctcattgggtgagtgcttccctatgcacaattacaagggtaaataattagcatgggggagaggggaggccaaatcccaaccaggaattaaatcactgcaaactatggatccatttgtaagaacatataaacctgt

SEQ ID NO: 483204 - DNA, 1000 bp, Homo Sapiens; identical to SEQ ID NO: 309535

SEQ ID NO: 483205 - DNA, 1000 bp, Homo Sapiens; identical to SEQ ID NO: 309536

SEQ ID NO: 483206 - DNA, 1000 bp, Homo Sapiens; identical to SEQ ID NO: 120098

SEQ ID NO: 483207 - DNA, 1000 bp, Homo Sapiens
cacagttctttctccttttattcacatcttcaaggcatggctttgtttcagtgtgtttaagggggtggtacctaaaatagaaagccccccttgtaggggagacagtctccctcctccagccatgccacctggaccagggtgcaaggtgaggacacacatctatcatgaatattttggcacgctgcagaggacaggtctgcacacaggcctctgagaggagcgtatcctctaccctgcagtgaggtctaggagcagcctctatgggattgccttgcatagacagcacagagttcagccccccagtgaggaagttgttctcccagaggtaattcgtggcccatagagaaaaccaagcagaagagaacgagaccttccttccctggggtataaggcagggagccctcgagggagtcaacttcagcttcaaggcctgaggacccaatcagaaaaacaaatgcaccaccatcaggaagccactgtccttcagcagctaagcagctgtcctccagctgaccccctcggagtgcctccaggagacctggggctgttacccacccaagaacattttcttttttttgaaaaaaaaaaaaaaacaaaaaaacaaaaaaaacagtcttggcctaggtgaagcctaggaaatcaaaagccacatcttattctttgtgagttcattgctggtgatggtggcctgagcccaagtccctaaatgaaccccagacggctaagggccattaatgtggctggcactgaaagcggtcagccaggggaggccagccacactcagatgtcagcaacccagagtctctgggtttgagactcttgatcaccatcacccaggcacatgcccacgtgtgggcttaggtgatgtcactccccctccactctggctaaaataaagcaaaccacactgcagtgtcctaggagggaggtggctgctgctctccagcatcagaaaacatgtcagttacagtcctcatttacctagaataggctttcagga

SEQ ID NO: 483208 - DNA, 1000 bp, Homo Sapiens; identical to SEQ ID NO: 309538

SEQ ID NO: 483209 - DNA, 1000 bp, Homo Sapiens; identical to SEQ ID NO: 309539

SEQ ID NO: 483210 - DNA, 1000 bp, Homo Sapiens
gtcatagcaccaatgacacagtatagttactgtcattatcattgtcctcatagggcttagagttcccaagcagacagtcattcttgggccacagcacatcctatacttagggagtggtccaggccaggacagtatggcttcaaattgtgtcaaaggagagcttccaaatcttttataatatatatcccagcatccagatacaaatggtaatattcacggcacacacagaagcaaacagtaggctacttctggccctgaggtatcttgaagggttgagggggatcaatatcttggctcatctgtactgtgacagatttggaagatctagtctaacccattttttccctcccctccccctaccaccttcagagaagctgctgctggcttggactgcggtggggctgcccctccaggatgtgtctgtggctgcctgcaatttctgtcgccgtcctgtacactttgagctcatgagtgagtgggaacgttcctacttcgggaacatggggccccagtatgtcaccacctatgcctgagaagccagctgcctaggattcacaccccacctgcgcttcacttgggtccaggcctactcctgtcttctgctttgttgtgtgcctctagctgaattgagcctaaaaataaagcacaaaccacagcatgtgaagccttttattggacagggaacagacaagtgcattctgactccctcagacaagtggcagatctatgaggtaaccataggtcacttgttggtcaccattccattttaccaacagggaaacagaatgagaaagaggaaggaaatgcccaaaaactacacagtgagttgcaaagagctaggatacttggcagatttatttgagatggctcttctccaatggtttcaataaaaatccagggattgacgcttcactggtaatccgggccctggaaatctgggcccagggtagcccctgaagccaggaaatgagtcagccctaaccaaattccctagaaagga

SEQ ID NO: 483211 - DNA, 1000 bp, Homo Sapiens; identical to SEQ ID NO: 309540

SEQ ID NO: 483212 - DNA, 1000 bp, Homo Sapiens; identical to SEQ ID NO: 309541

SEQ ID NO: 483213 - DNA, 1000 bp, Homo Sapiens
catcgtgatgtcttatttaaggggaacgtgtgggctatttaggctttatggccctgaagtaggaaccagatgtcggatacagttcactttagctacccccaagtgttatgggcccggagcgaggagagtagcactcttgtgcgggatattgatttcacggaggatggtggtcaagggacccctatctgaggggggtcatccatggggacgagaagggatttgactgtaatgtgttatgtacggtaaatggctttatgtgctatgtactgttaagggtgggtaggtttgttggtatcctaatgggtgaggggtggctttggagttgcagttgatgtgtgatagttgagggttgattgctgtacttgcttgtaagcatgaggggggggttttgatgtggattgggtttttatgtactacaggtggtcaagtatttatggtaccgtacaatattcatggtggctggcagtaatgtacgaaatacatagcggttgttgatgggtgagtcaatacttgggtggtacccaaatctgcttccccatgaaagaacagagaatagtttaaattagaatcttagctttgggtgctaatggtggagttaaagactttttctctgatttgtccttggaaaaaggttttcatctccggtttacaagactggtgtattagtttatactacaaggacaggcccatttgagtattttgttttcaattagggagatagttggtattaggattaggattgttgtgaagtatagtacggatgctacttgtccaatgatggtaaaagggtagcttactggttgtcctccgattcaggttagaatgaggaggtctgcggctaggagtcaataaagtgattggcttagtgggcgaaatattatgctttgttgtttggatatatggaggatggggattattgctaggatgaggatggatagtaatagggcaaggacgcctcctagtttgttagggacggatcggagaattgtgtaggcgaata

SEQ ID NO: 483214 - DNA, 1000 bp, Homo Sapiens
tgtgcatgacaccattgtaggtaggtctgctgcgtaggcctgggggcaggtgcactggagattcggccagctccctgcaggccctccatggtggccagaacccgctcccacaccagccagacctctgaaggaattccaactatactagaaaactgtctagaagacctagttttaagccgaatttttacagagctatgatgtaaaagagacttctttctcttttacagagattttcaggtgttttcattggctgagatttttttgtttgttttgagacagggtctcactgtcacccaggctggaatgcagtggcacaatctcagcttactgcaacctctgcctcccaggcttaagggatcctcccagctcagcctcccaagtagctgtgactacaggtgtgcaccaccacgcctggctaattttttgtatttttagtagagacagggttttgccatgttgcccaagctggtctcgaactcctgagctcaagggatccacctgcctcggcctcccaaagtgctgggattataggcgtgagccaccacacccagcctactaacagtgagttaacatccatcatagcttagcagaattctctcttgccatttgtccacttggttgttgtttacttagtttgcattttccctggaacagatttgtatcggtttgcaacaattaatcactgaaacatttaaagttttgcctaaattgtaaagcagttgtacgaattcagcaatgtttcatttcaggaccactgtcattccgtttccccttgtagcaagtgtacacacatcataaaactgtctttgccctgctagataaacctagacacttctgttgattataatgaaagatgatatagtatcttttgggttaatgaattcaaaaggatgttcctacttaggtaggaatgagctgggattaggggtatgagagatgcttatctttcctcccagcccctctccttggttgaaacaacctttcagtcacgaggaaaatt

SEQ ID NO: 483215 - DNA, 1000 bp, Homo Sapiens; identical to SEQ ID NO: 309545

SEQ ID NO: 483216 - DNA, 1000 bp, Homo Sapiens
gaacagatgttcaacgttatcaggcattagggaaatgaaaataaaaccacagtgagctactgttatgtacctactactagaaaagctaaagttaacaaatactgcaactatcaagtgctgacagggatacagagcaactgcctactgtggtgtttaacttacaggggtgctcacaacgctggtggactgcaaaatgacagacgcactcgggacaacaacttggctcttatgaaataaacatatacttaccaaatgacccagtaatcctgtgcctatttacccaagagaaatgaagacccatgtgttacacgaaaacctgtacatgcatgtctgtagcagtacgattcatcatctccaaaccctggaaacaacccagactttttttctttttaggcagactcttgctctgtcgcccaggctggagtgcagtggcacaatctcagctcactgcaaccttggcatcccaggttcaagcaattcttatgcctcagcctcccgtgtagctgggaatacaggtatgagccaacatgcccagcaaatttttgtattttttgtagagatggggtttcgccatggtggccaggctggtctcaaactcctggcctcaagtgatccacccgtctcagcctcccaaagtgctaggattacaggcatgagccacggcatccggccacaacccagacattcaacacctgaatggataaactgtagaacacccatggcatggaacaaattacaaactcaacatacccagcaacctgcaggaacgtcaaaggcattaggctgtggggagaggccagtccaaaggttaaatatagtttggttctatttacatgacattctagagaaagcaaaactatagggatgtagcaccgctaagtgggtgggggtggagaagcacatgaccacaataggacagcatgggaagtgttctggggatggacctggtgtgccctacgtgtgcaaaaactgcaccccaagagtcaactttactgcatgt

SEQ ID NO: 483217 - DNA, 1000 bp, Homo Sapiens
gaatcaggatctcactctgtcacccaggctagagtgtagtggcacaatcactgctcactgcagcgtcaacctcctgggcttaagtcattctcctgcctcaggctcctgaacagctggggctacaggcgtgtgccaccacacctggctaacttttgtttttttagagacagggcttcaccatgttgcccaagctggtctcaaactcctgggctcaagtgatctacctgctttggcctcccaaagtgctgggactacaagtatgagccaccgtgcccagccaaatattatttcttgagcttattttcataggaaaacgtacccttaaacctagaaccatgctgtgcctatttggggtcaggaatgaatccgatcttaaggacatctatcattccacaaggatagagtggaatctgggcctaggggtccaggcactgtggccagctagctcaaagggctaaatccacctcttctctcctttttgatttactttttgtagactaaacattacttcttctcctctgggatatttgggtttaccattcagataggtatccttatgatgaagaaggtaaaaggacctctagagagaagtttaggagtctttcccccagtgaagggtcttttagtctgaaaccatcatgaatttggtcttagtttgcagggagagggtgtgtgaggagagtgtggcatagaccagaccctcaggacaaagccccagtcctctttgaaccttccttttcattaaatcatttgttctttcatttgacaaagacttatggggctctctgctagaccttctccctcctcctttcatctccaatccactggcaaactgcactgattcaacttcccaaagcatctcctcaatcatcccctcttcttattgccacaactctaagccaatcctttatgacccctcccctgtgtgatgatcttcataatcttctatgtggtctctctgctaccagtctctccatgccaaaatatgataagagatgag

SEQ ID NO: 483218 - DNA, 1000 bp, Homo Sapiens; identical to SEQ ID NO: 309547

SEQ ID NO: 483219 - DNA, 1000 bp, Homo Sapiens; identical to SEQ ID NO: 120099

SEQ ID NO: 483220 - DNA, 486 bp, Homo Sapiens
catggtgtcacctgtggatgctgaggaaaggctggtgacaggaagaggggtggcgtgacctgtggatgctgaggaagggctggtgacatgaagaggagtgacgtgacctgtggatgctgaggaagtgctagtgacaggaagaggcgtggtgtcacctgtggatactgaggaagtgtcggtgacaagaagagaggtggcctgacctgtggatgctgaggaagtgtcggtgacaggaagaggggtggtgtgacctgtggaagctgaggaagggatggttacaggaagagaggtggcgtgacctgtggacactgaggaagcgtcggtgacaggaagaggggtggcgtgtcctgtggatgctgaggaagtgtcggtgacaagaagaggggtggcgtgacctgtggatgctgaggaagggctagtgacaggaagaggcgtggtgtcacctgtggatactgaggaaaggctggtgacaggaagaagggtggc

SEQ ID NO: 483221 - DNA, 1000 bp, Homo Sapiens; identical to SEQ ID NO: 120100

SEQ ID NO: 483222 - DNA, 1000 bp, Homo Sapiens
ctttaaagcactttattaatgaaagttggaaacctaaaaattgaacagtagtttaataaaatgtggcacatatgatggaatatcatgcagccattaagagatgtagaaatatacttgacacagcaagacagtcatggtattgttgagtgaaaaaaagttacaaaacagtatgtacactttgatcccattaaaaatatctataaatgcacagaaaagtctggaaggccatatacttaaataacagtggttctccctggatgatggaattatcagtgatttttctttctcactgaatcttttttctttttgccaacagggctatgacttgtattataaaaaagcattaacaattctttaaaaagtgtcctttgaagtaagaatgagagcagaacttagcaatctaagaggcacagggatgtacacatggtttctgatactgttttaacggtttgtcaaggtgttttgatgttagtcaccaattaaaaggcactgtgttgagtgaaaacgtggatggtggtagtgcttactttagactaagcaatccattcctagaaaccttccacagcaaacaagtactggcattctaagcaatacttcccactatgatatccttataccttcctacccacttgtaatacagcccagaagtttcccctacatggacagggcactgttgttggtaagggttacagaaggcagagaggatttttcaagtgatgtcagagaataggcctgaaggtgaaatgaatgttctcttagttctattgcagtggttctcaagcttagagtgcaacagtattactcaaacagcttttacaacagattgctgggctccactctcagagtttgattcagtaggtctccgaaaaggcttataaatttgcatttttctttcattcaacaaaaatttattgagttcatactatgttctagatcttgtgctaagagttgggaatgtaactgccatcaaaagaattatagtttttatctcagggagcct

SEQ ID NO: 483223 - DNA, 1000 bp, Homo Sapiens
atggaaaaccatgtttatttttaataaaggatgacatttccaatcagtaaaatatcataaaagtataaaaatgtactaagtacaatcattagcattatgttataggggaatagtggttataacttttccctgtaagatggcacattggatggtcacagttggcttgatttacagaggggcaagagtaggtgaccagttgtaccagttgctccagtttcctaggatttgggactctgtaaaaatgagaaagtcccaggcaaactgggacggttggtcctacaagaaaaagagcagcatcagagtgttggctatagtttggaacttaggaacaggatcagacattattttttaacttctccacctattttccctttagctgtgaaataaaaatcccttttgttattactgagggtgttacagctttcagaggcttttttaccactgggtttcatgtaattttgacttaatacctatgtcaagcctgggaagaaaggcagttctaatcaacttgcaggtgtggcattctgcttcaagccacctgcatcctagagagcaaggattcaaactcagatctcctgaggccactgttctgttctttctggcttttagtagtagccagaaattgggggaaaaattgaggtacctgagatccaagttttgactcaatcccctcactggaaacaattcacatcatcatcactttgccaggtatgtgtacctgccccttattgggcaatcctcatgcaggattcctccaaatacccaccagctggctagtgctggcatcattatatggcagaggcagtgaaacagtgtattagctccaggacagtgctgcaaatggcccttccagtccaggtttgccaggaagatggtcagagggccagctccctgtgtcatttgccaacttgattgaatgttttctggcatctttgctgaggaggttctcaagtgataggtcaacttatggctggtggcatgactcgtaggctcaaagact

SEQ ID NO: 483224 - DNA, 1000 bp, Homo Sapiens
gtgtgtggtttttctttttttaatgtctgctgttaataaaatatttttacagagaccaaaaagtcagaatagtgcaaaacatctcaacaccatgcattcatgaccacttctcgtttgtgttaaacatttgttccaagtcacatatttacagagaaatgaaggcgtctgtgcagacactggaccgacggggtagaatcaaaacaaaacaaaaaacaaacaacgttttgatttcacatctgcaatcacatgctaagagttgtgtggaggggaagcctccccggactgcttggccggtttgtgggggtctgagggagcacgagacaggggtggacaggggtcaagtccccctggctgtgtggttggggatgatcaggggaccctccgcctgtgacctgtgtctccagagagccactatggctggacgggggtaaggggtggggtgttacttgacacagtcaacttgatttttctctgaaacaataaaaggcaaagagaaaagcaacacgtgtcagcaaagacaactttggtcctcaacgattcttaggaaaggattctggggagcagacggggttgtgatccgggactaaggccctcccccaacttccccagggtggcagagttccgggaggccccaggttgtccccatctgcaaaatcgacagcacatggggtaggggtaggggacagaaaggctctgagatcccagccgagagaggtcccaaggatttctagttgggtgtttagttttttgcatctctgatgggggcatggtgaggtctcaggctctggggcctgagagaggaattgggggtgtggacaggcacctcctcattttatgcaaatcattcgaggacagactggtaagagtgaacagatccttctttcttcaggacaccctctttacttcccccgacactccctgccttggtctctgcatttatctttctctgtatatttccacctctatgtctctctccatctctgtctctctccgtcctcat

SEQ ID NO: 483225 - DNA, 1000 bp, Homo Sapiens
cactttgcaagagatgctatcctgacatttaattgtgtattatttaatcatttaaaacaaacaataataaaaaactcagccagaacacgcaaacgtgatctctgggggtcacaagatgaaatggtaggtgaatgttatcttctatcagccccttttgcctccgagttgggaaagtagttgtttcaacagatcagcttcatcctttttcttcagaagccccaaaccgagatgctgtcagaataagtcattttgctgctgcaaaaaatgatcacagtctggtttctgagtcatctgagttttaaaacgtaaacttccattaacaacggcccttcaccaacagtaaaatggggcagcaaaagttctacttagaatttccacgtgaatgaaacccgcaacctacaactctgctaaggaaaccaggatctcaaagaacagattcatgttttagggactttaaaagaagaaatccaagcagttatgcacatggacataatcctgaaaacccagtcaggggctgggtgcactgtcagtgaggagtttttctgtactttgcagaaacatgaggttgaaagtgataatatagatatttggttttcagtcattcagaaattttcttcaaagaaaggcaatttgagctaaattaccatcattttcccttcttttgcaaatcaagaaatactaatccattgcatatgtaatccctcatataatttttagcccaaatggtcaaaattacaacttttaattttatgagctccaaattattaaacaccaacagtaaattgtgtgcatgagaagaacaaagacaaatacaaaatatagaaactttttcttccagccacaaaaaacgaagttatgtatgtatgagaaatagaaacaataactaaacaattagtgttaaattcaagacctctgggaaagctgttgttggttataggctattatttaccttagaatatgaaagtttaaaggtcaaattttcaagttaaacttttcaagt

SEQ ID NO: 483226 - DNA, 1000 bp, Homo Sapiens
gcttataaggaaacggagtcatttcaacctttccttccaaacttgataattacttattgatgactattcaaaatttgacattttaaaaaactttttgagcttttaaaaataatagctataaatgcaaagtactattgataataaaaccaagttgtttatccatatacaaaaaaggtcaataatgttttaaaagcacaaagttgcattttaaatcacaattgcatagttctaaaatgcctggataagagttacataattttttttttaagaaaattcaagtttggttgacagcgggacccaaaagacatttgcagagcagagttcagaatggaagcgctgtttcaatgtgaattattgcattgttgctgagatattacactatcatgagaccaaaattgctacaatttaattacaaatcattggcattttaaaaaccatttttctgtttttggctaatataacactttcctgtagaattcaactgaaatttcatatatcccacccccaaccagcaaccgaaagccttagaaaaagctctatttgtatttctgtgtataaaaggtactgcatatatacctcttagcaaaatatgtgctccctttcctctccccaccccagaaccatgatcatttttgtacaaaatcctggtgaagaatcatatcaaagatgagaagcagggagttcaaaggtaaacaaacatttggtgaagtgtgtaggaaattccatgagcctcctgtaccagccccacagaagtcctggcttttggtgaatgtggcccagaaaagccaccagtgtgtgtggcagcctttggacgtggtggtgcccctcgcctgcagagcacagcatcatgagggtgctggtggctatggggggactgcactcagggaagggctgaagcaaacgccaggcccccatctgcaggctgctcagagtcagtgggtataaaagatgctttagcatttggaagaagggaaaaatcttcctggagacaggaacttgt

SEQ ID NO: 483227 - DNA, 1000 bp, Homo Sapiens; identical to SEQ ID NO: 309552

SEQ ID NO: 483228 - DNA, 1000 bp, Homo Sapiens; identical to SEQ ID NO: 309553

SEQ ID NO: 483229 - DNA, 589 bp, Homo Sapiens
ggccagtgcgagctcggtacccggggatcctctagagtcgaagaaataaaaaaaagccctttcctgaaagcgcttatacttatagccaattaacttcattttctgaagaaaaacgaaatatatggagatttttgtagtctgtttttaaaataaagaacaaaatctaagacatatcatgatttataaaaacaaaaaaaccttgcaggatatgcaaggcttctgggatgacccgtacgggattcgacctgcagtcattagtcagcagattcgtcaccagccagttttttctgaacgatcctcttgatacgtggagcgtccggatctagacagattttacgaccgtctttcagagtagctatttcattttcttggttgcagtgagtgcctttaccgataacttccagagactggatgtttttcgggtggatcccagaagtagttttgatgcacaggcaacggagctcagcgtataagtcagagtccagagattcttctttacctttagccaggttcatcagctgaattcacctccttgtcgacaagctattctgacatcatagttttcatttatagtatttattcgaagctt

SEQ ID NO: 483230 - DNA, 303 bp, Homo Sapiens
cgactgcatgcttttttagcaagatattttaatatgaccacatttgcaatgtgaagaaaggccctacatttgacatccatgcatgacagcttacccacagcattgtagagaggctctccagttatcttgtcccagactacagtggtttccctctggttgctgacaccaatagctttaaagagaaagttaaacagaaggaagtcaaaaatttaacaagtaggaaactacttcaggaaaacagctctcatcttactagagacacaactaaacatagcaaatcaaaaaaatacttgaaacatttgt

SEQ ID NO: 483231 - DNA, 1000 bp, Homo Sapiens
ctggtaggtgggggagacgacacaggatgaacctggggagcctggggtggggcaggcatgaatctggtgacagactctgggtgggatacggccctacctcctccagccaggccactgcacccttccctgtccgcatctgcatgcccactgctccctgtcttcaccccacccaagacgacacagcccatcctgaccttacctttgccaagaactgcttgatgcagtgagccacagaggcccagggttccttgccaattcctttccctcactcccatcaactacttccccctacactgccaccggcactgcaaagagcaactgatcaaggtgctcccagtctcttacggtggagagatacagcaagctgggaaactggggagccatggaggtggtgacatggccttgtccagcacgcaatgggcagctgctctgaggagctgcctggctccttcagagggaggcagccctttatttcagagaatccctgaggccccagctgtattcaaatgtcagcccatagccaaagaatatctgtatgcctcaggtagtccagtggctaggattcggccataaacaaaaggaatgtttacatgagctgtgtctatgttccccgcctctttcctatgctttagtaatcctgggctgaatgtgaagacctagtccactgctcataaagggatcccagatggaactgagccttccatagaaccagctgcattactaacactgcaaatcactctggccccctcgtccccagttctctcccatcctcagctcctgcagttgtgagcaagggtagggtggaaaggaaggagaagggggatgattatcatgttccacccacccatcccacctgcttctgaatcctgagtagtttcacccagtgcttggcctgttcaggaatgtcacatgccctacctaagccccacccctgcccccagcactttggactttggacatgtccctttgagtcacacaaatgggaccaagtttactaggt

SEQ ID NO: 483232 - DNA, 690 bp, Homo Sapiens
ctaggggaaaggaggagagggggcagaggatgtgagagccaggccccacccccaggcagatgatgggggtcttggccacaccctttatgcagatgagcacactgctgcaccccatacaaataatccatctatctgactccaccccttatgtagataagcagacctgtgaatggacagtttctgagccatacccctcaaacaggggccgaattctcaagtgagtctcctctttggccacacccttatgcaaatgagaacgcctgaccaatgttctttttttctttttaaacacggtcttgttctgttactctaggatggagtgacagtgggtttgaacaaggctcactgcagcctcaacctccggggctcaagcgaccctaccacctcagcctccccagtagctgggactacaggcacgcaccatcacgctcggctgattttttttatttttagtaaaaataaaatgttgcccaggctggtctcttaactcctgagctcatgcgatccttcctgttaggcctcccaaagtgctgggattacaaccatgagccaccatcgcgatcggcctggttcattgcttaaagggacagcaactgttacaagtaggatgagaccctgcaccctgcaccaaagacccctagccaggagctgctgatttgccaggagaggataggaaagtgggggtcctac

SEQ ID NO: 483233 - DNA, 1000 bp, Homo Sapiens; identical to SEQ ID NO: 309554

SEQ ID NO: 483234 - DNA, 605 bp, Homo Sapiens
aaaaagggggcaaaatccagaggatgcctgtgagaactgcaatgaaacagaatctaacacagagcctggctcacagtagggcctcccctcctccacaaggcttcctgctctgacttacatctttgggaggaggtccctctactgtcattgagaccagattctcccctcgcagcagcaccagaccgaggactcgcttctcttccctttctgcttgtttggagttctttggcctaaagagaggtttaagaaggaacaaaaaaagtgttagaggtgggtaaagttcacctgcctagtggcctccaagatttgcttatactgcatctcctaacaaacagtacacaaactttcccaagatagccctcctggatagtctctacaggctgaacacataacctcttaggtggctatctacctgtttcctaccatgccaagaggacacactgaccaagagataggacaaggtcaacaaagcccagcccgggcccaaatgctattccacagcaaccgtgaaggcccttccctcagccaagtcttctttcttaggaccctattccctcccttcagcttaaggtcttgccaacatcaggaggctgcctaaacaattc

SEQ ID NO: 483235 - DNA, 1000 bp, Homo Sapiens; identical to SEQ ID NO: 309556

SEQ ID NO: 483236 - DNA, 1000 bp, Homo Sapiens; identical to SEQ ID NO: 309557

SEQ ID NO: 483237 - DNA, 1000 bp, Homo Sapiens; identical to SEQ ID NO: 120101

SEQ ID NO: 483238 - DNA, 1000 bp, Homo Sapiens; identical to SEQ ID NO: 309560

SEQ ID NO: 483239 - DNA, 1000 bp, Homo Sapiens
ccactagagccatgacggtttacaaatgccatggcaacatcaggaagttaccctatatggtctaccaaggggaggcatgaataattcagcccttgtttagtaaataattaagaaataacaataaaatgggcaaccagcagcccttaggttcactctgcctatggagcaaccactctttattttcctactttctttaaaacttcatttccttttcctctatggacccgccttgaattctttcttgcatgagatccaagaaccctgtcttggggtctggattgggacccctttctggtaacaaaatgatcaaagttaaagctgtagttactgtaactgagttggccttggaatgccatcccatatagtgccatgtttgagagctggttttcatttcattggtggcattagaaatgtactattatattagggttaattcgccctgctaccccaactagctagctacctccccttgggccaggcaaaatggaacagtagcttgtacatatgaattgttaacatgtacatatcttcatacagcagtcatgtctaactgtccctaacagggcaagggagatgaccggtcattttttctcatgaaaacaagatacactcaggtgagttttgagtttgttcaccatgcagaatgtgacgagataagtttaattttctagcttagtgtttttagcttaaaatgttgcaatctaaagctaaaatgttcacctgaggccaaggacaacacagcaaaaacaacagggccaatgtgtcctcagacctttggaatcgcagtcagatatcactatgaactgagtgtttgtgtttcccccaaatccctatgttgaaaccctaatccccaataatgggatgtggaggtgggacctttgggaggcagttaggattagattaggtcatgagggcagagcctcacgatgggactagtgttgaagggaaatgaagagaccatcttattcttcaccatgtgaggatgtgaccaagtatcctc

SEQ ID NO: 483240 - DNA, 1000 bp, Homo Sapiens; identical to SEQ ID NO: 309561

SEQ ID NO: 483241 - DNA, 1000 bp, Homo Sapiens
gaggtttcaatattttattcaagttttttaagtgttgttaattacagcatttgaaggggaggatctaattccaacaaaatggaagactctaaaatgtacccattaaactgctaaaaaacaaattgagtggtgagaatacaacagaagtccaatttagattctgagtgttgtcaccatgtgattacaatcacacagacacttccaagcttatagctggagctcctggaagctatttcatactctggtgcaagggccaaaaaaaaacacaacacaagaaggaataagtcctgaattattggcttcatcacatccaccttctccaccccaaaatggcacaaaagaaacagttaccacaccctgcagaccttttggtgtaaaagagatgatgatgaactggggtgggaacaggtcatgaagatctgtctaaaaaagtcccattcaggtgagtttgtacacaccatcaagcagcgagcctctcatcaattagggttagggaaccaaggttcgattctcaggaaatcacaatttcattcatttactcaatatgaatttacaaagtgcctacatattatccgcttccacttgcagccatttctagataaaaaagaaacctggcatctcaaaggggccaccaagttctccccgagtctaccactgaaaggaccttttttggaaataggtttcttctgtacctctggaagggtaacatcttaaagctgaatcaactttaacctggagggctaacatatttagcaatacttgcatcccagacatacaacattaaaagatacactaaattctgaaggtagctatgctgcaaaatagtttaaaattaaacaattgtacagtattcatttatgcttgaaattccagtcctagaccaagcttgtggccaccagcattgacgttcttgccatccagaagagctgacagtgtcagtttaatacctgcagggagaaaaatgagggagaggaaaggagaggaatggaggaaagaaatg

SEQ ID NO: 483242 - DNA, 1000 bp, Homo Sapiens; identical to SEQ ID NO: 309563

SEQ ID NO: 483243 - DNA, 1000 bp, Homo Sapiens
gtgtttctgcacaccctgttccgtctggctgaaaagttctttcttccactctttgacaagtcaactctgacttgtgggttgaaaccatcagtttagggctgcattctctatcctggcactacttggattttatgttaccatcttttaatttgtctgcctctcgctccagatggggtgcacccagaggaccagaactcttctcagaggagcttgtgatcattggtgtatttaaaggaagaagatacggagaagaaagtccatacacattagaaaaagtggcaaacagagtacacaatggataaaggggaaatcattacaaaatgacaaaaaggcagattttagactgaagtcccttcttaacatagcaagtaagacagacatttctatttctttacattattccaccctcttgctatcccacatcatcccggtccaagttgtggatatcactaggtggggctaggccatttagtaggaaacaagactgtgtaaaagacataggattaccaggtttttcagagatgttttcactgaacgatctttttttagaatgtggagggagttttgaatatttatatatatatattttctcaacaggagagaattcttgttctcagtttacttgggatgcactgtgccttctctttggaaaacagtcttagcttatgatactacagagttcgggacacagtcagaggagaaagactgggtccaatttctctgtctaaggctgtaggcctaaatgggaagctgtgctgcacagtccagttcagcagaaatgaagactatgattagggcacatgggaggaataagagagtgtatcggacagggccttacaacggtgcaccgtttttcagtgtgtttcacaggcaattcctgtacacagactcccacttatggattatggggatcagttaacccatctaacaagggatgatccaacaagatgatagagtattccagaaggatctcagtgtacacactgattttcttctatta

SEQ ID NO: 483244 - DNA, 1000 bp, Homo Sapiens
ccacaactccatgaacatgaatgaacgaagttcctctctattttcctttaaggactgttgtgcttccaacaggactgagacagccggcagggatcagagctggactaagtctgcagggccccagacaagttccagcctcccctttctggcctgtcatgactttggacagagctccagaccttcccaggctcagtcttcaccaactcgggttccttgatttgccagttacctccctggcccattttccaggccactaacctctctggcttggagtgaagaaggatctgactctcgtgcgcccatctccctccacacccaggtcccaaataaccaggccacacaccaagtttcaagtatctgtctcttcctttcactctctcaaaagaaaaaaataaataaattgcagaaggcggcagcatttccagtcttccctggctcccggacacccgacccccgacccctgccccaccctccctcccgcatttcccactccctagacccatccctcccttttccccaaaaaaattcccaggaaaaaaaaaaaaaaagccacatttagaccttccactcatgcaaaccggcaaagaaaaatggtgggggcatgtggaaggcaggggcccgctgcggagtcccctgcttctccccccaaaaaaccacctttgagaagaaaaaaagtggaaaaaataaatgagaaatcaaggtaacatggggaattacgatgaggcaggggtgaccccagaccctgccttaggagagagcggaggcctgtggccctgcatccctgcagcgggtgctcctcgagggggccctgacttctggaatgtgtgtgggagaggatgggggaggcaggtggcccccggtgggtctgtgtgtgcattgggggcaggtgggggcggggatcctaaggagcaagggctcggaacaaggagcccagctcccccccagaccccaggttcctggcgttcaggagcccagttctggggtgcggggatacatgcag

SEQ ID NO: 483245 - DNA, 1000 bp, Homo Sapiens
aagtgttgggattacaggtgtaagccactgtgcccggccaattttttattattaacatttaatgattaaaagtacagatactatcctaaaagtgactgcagcaaaccataatctaattctttctgaaaacacggtctgtggatgaattttctcacctgttcaataatttgcctcacggtatttaaccggaccactccagtggatttctcagatcctgcatcttttggttccgtttctgcaaaagcaaaaacaggaagctaaataattgtttagaaaacagtgacaaccaaatactcccacctagcatcaagcaatgatggcacacctgacattaagtgtctcctaacaagattcagtgggaaggacccacataacctgcttagtggaaatctaatcatgaagaaacggttaggccagtccaacaggaagcattctaggagacaactagcttggattcttcaaaatatcagtgtaacaaagttatttagaaaaaagaggggactggaaagacataaaaatcacaaaaagacataaaaatcaaatgtcatgaatggtccttggttgtattcctgaatttaaaaaaaagctatgaagcacataactaggacaattaagaaaacgtggaaaatggactatatacaaaatcacaccacatcaatgttacctttcttggctgtgataatggtattgcagttatgtgggagaaagtccttgttcttaggagattcacacaagtattcagggataaagtgttataaatgattctgcagaaatttttcaaagagtatgtgtatgtgtgtgtgtatgtgtgtctatggtgcaggcagtgggtgagagaaaatgcgtgacaaaatgtcagcaactggtgattccaggtgaagggtacgtgggtgttcatgattcttccaactcctctgttagaaatttttcaaaataaaaatttgggggaaaaaaaaacactgacagacttactagcagtttgaaaccagtcaggtaactc

SEQ ID NO: 483246 - DNA, 1000 bp, Homo Sapiens; identical to SEQ ID NO: 309566

SEQ ID NO: 483247 - DNA, 1000 bp, Homo Sapiens; identical to SEQ ID NO: 309567

SEQ ID NO: 483248 - DNA, 1000 bp, Homo Sapiens
aagcttgtttatatctttgcaattatttatgaagatctatattattttaaaaatccaaacgagtaatcttatattcaaagagattgtataacactctctagatctcctctttagaccaaaaaaaaaaaaaaaaacaccctggaagccaccaagggcatttctttcctttataatacatacagcttctaacacttttccaactgcatgactcttgttcattcacagattcattcaacaaatatttaatgacaagctattacgtgccaggcactgggctaggctcggggaacatgaggatgaaaaagcacaatctctgcttttacggtgcttacagtctaatagtagaaacagacatgcaaaaaaaaattacaatacaatacaataaagtgcttccatggaggtatttacaaattgcggtgggaacagggaaggcgggaaaaaacatctgcctgaagaaatcagggacagcttcacagaggaggtagctattgagctgagacttcatcaatgattaggaattcaccatgtagacgggcaggcaaagggtgtttcaggcaaagggaacaacaggtacaaagacacagaggcccaaggggcacttcaaagaagcaagtaaagaggtttttcttgagctgaaggtgcagtgaggaatastggcagcatgaggccagacagacaagcagggatcagatcaagaagagccttttgaccattcttccatttattcagcaaacagttactgagtgcttactaggtgccagtcactcagctaagtgctggggctgtaacgggaaatcagacaaacacatccttgctctcatggagcttacattctagtagagaaatagacaaaaagccaacaaataaataaaatacagacttagaaaatgtctacaaaagaaatagggtgctgaggcagaaaatagtgtcacagggataggcggtagttagggttattagcaaatgcctcttggaaaggatgtaaaactcacacctgcag

SEQ ID NO: 483249 - DNA, 1000 bp, Homo Sapiens
aagccttgggggaaaccagtgatctcttggcaacaggaccagaaggtacgtaatctcttgttttaattatatttcatctgctgaaaaattgcttatctctctgagatttatcttagagatgactgaaagtaattttgtgaccttcacattgtccgtatttaagttagataactgaaaatttggtgagcatccgaaaacctcaagtatgtatggagattaagatttccaactctgaagaaaaactgtcaggttcaaatcttggtcctgttcacctctgatgatgaactctgtggttacaaaaccctcctgcctccctttatccatctgaaaaaaaaattggtatgactacatagtttggcaagtgggggctaactgagctactagacaacttacaccgtaagtcgacacaaagcacatgcacaataagcataattaatattacattattttattttgtatgaggtggcaacaaatagttatcacatgcttaattttaaataagcattaatagtggtagaaattaaggaaatatatttattagagaaaacttagaaatatgaaggctctatctagttatatttatttcttatgtatcacatcctcaattttaaataaaaagcattaataatagtagaaattaagaaaatacatttattagagaagtctattagaaatatcaaggcttaatctaattatatttgtttgttaactgaacttgagacatatgaatattcacatactttaagatattttatcacctatttgaagagggactctggccactataagaacaactcgcacatagcaaaaattagtgattgaatacattctaaagagtaacatacattttgaaagtgagctgttgttggctgggcacggtggctcacacctataatcccagcactttgggaggccgaggcgggcagatcacgaggtcaggagatcgagaccatcctggctgacatgatgaaaccccgtctcgactaaaaaaaatacaaaa

SEQ ID NO: 483250 - DNA, 1000 bp, Homo Sapiens; identical to SEQ ID NO: 309570

SEQ ID NO: 483251 - DNA, 1000 bp, Homo Sapiens; identical to SEQ ID NO: 309571

SEQ ID NO: 483252 - DNA, 1000 bp, Homo Sapiens; identical to SEQ ID NO: 120102

SEQ ID NO: 483253 - DNA, 500 bp, Homo Sapiens
ttttttttttttttttttaagaatggacatcattttatttcattttaatttagttttgtttaattctagtttcagttttgatgatattttgccatgcttcccaatttttttctttgataacaacataattcagggagaaagtacaaatttgccacaggttgaacacttaatttgtgttccttaaaaaataatgctgtgcttagtttattgccaggaaacttcttgcttgatgctttggtctgttttgtttttaatgttttaaacaaagaatattccggcctttacttcagagtttcttccaaagatacatatgcattttggatcacagttctggaggttgaaatgtccacgatcagagttcctgcatggtctggttctcgtgacgactcttcctggcttgcagattggggccttgctgtatcctcacgtggcataaagagagctcttgtctcttcattcccttgtaaaggctccaattccatcatgagttccacccccat

SEQ ID NO: 483254 - DNA, 1000 bp, Homo Sapiens
ctccattgcaccccagcctgggcatcaagagcgaaactctgtctcccaaatataaaaaaaaaaaattagctgagtgtggtgacaggcgcctgtaatcccatctacttgggaggctgaggcaggagaatcacttaaatccgggaagtggaggttgcagtgagtcgagattgcaccactgcactccagcctgagtgacagagcgagactccgtatccccaaaaaaaaaagagaaaaaagaaaacaagaagaaaggctgaagctactgggggtctccaaagcaaaacactcgacgtccaagaccttggggaaccccagccaccagggcctgtgtggggagcaggtaagggtcaccggctggggtcagtaagcattcaagaagcgctcgttgactacatgaatagtaaatgtgacccgaggtgactttttaagggtggtgggagagaggaagcccacagcgctggtgtaagaggtgccaccccttttttgcccttctttgcttcttcttttctctgcccactcccaagcccccatcagtgattatagggggcatcccccaggctggggcactggagaccctcactcaccagggacagctttccggacttcactgtacactgtctctgtgtccttctttcctagatctggaaaaaggaccaggcataagttagtagctgcctctgggaacgaggtcagtccactgcagtcataggaaaaggtctgaggctctgcaggcaaggctgtaccccaccactgcaccccaccagaaccaggtccagaagcacccagagaccttgtcatttctgatgttagaagatcctggctgggcaaggtggctcatacctgtaatcccagcactttgggaggttgagggggcaagatcacttgaggtcaggaggttgagaccattctggccaacatgccgaaaccccgtctctactaaaaattccaaaaaattaaccgggcatggtggtgcgtccctgtgatcccagttactcgagag

SEQ ID NO: 483255 - DNA, 1000 bp, Homo Sapiens
catggctgcttttcagtcttaggctagttccagccagcccagagatcttattctcaccttaatggaccctggaggccaaggatccagtgtgacatctggaaggaaaagaggaagattggcccgtcggtcacaggctgtttaaagtctcaccaaatttacacatttctggtttagcctctcagacatactcttaaattgaaaaatgtattatctttccacatcaacattaagctctagagttcctcatcagtgtgcagactttttgagttgtttttccaatagtagggaagggtttgggttcagccatcatctgctgacgcacatgtcggggagggctgtggcttcaaaaagcacatactttgacccctaagaagttgactgatctaaactgcagaaaggcagagcttggagaagttcagcgcctgacctcagaagggtctgacactgacattcctggcctcttccctaccaggaaatctatgctgacttgctgactgccttggagtctttccattctgaaaatgccatagtggaaaaaacccagactctagaggcagaacaaaccgggttccactgctgagcccgtgtgaccacatgcctggtccttaatggttctgactcttatttcttcacatgggggcgtcatgaaggttaaatgatggaatatatgtgaaaatgcctagccttgcgttgggctcataatgggaacctcgtaagttgtttccccccatgttttcctctaccatctcattatctctgatttattgaaatctacctacgtggtgaaacaatttatagtcttcagtattaaaaataaaagtctggtttgctttcatttttgaaatgtaggcttcagtttattttttgtttttcttctatttttgttttccaatacctaatgcttgacttcctcaagagctctttcccaaagtccctaaggggatgctgctcccaagtgctgtaacactccagagaatttgcctgccattttctaattacg

SEQ ID NO: 483256 - DNA, 1000 bp, Homo Sapiens; identical to SEQ ID NO: 309573

SEQ ID NO: 483257 - DNA, 644 bp, Homo Sapiens
ctaacaaaggaataagagaggcagtgtacagatttaacctaattacagtgtgagacaataaatattctaatattgaaaagtagttcaatttttattatattaattctctagtggaattttgaaaaccaacctggatcaaaaaatacaattgcctttaaacaagcatactcattgtcatcaatctggatttcttgaaatggtctaaccagctcatctagaacacgattggccacacggctaatctcaacttcacagctgttgcggtgaataacatagttgtttcctatgagagagaaaaccaaaacaaaacaaaacaaaataaccacctgtctccccaaattgtcagcactgtttaaaatttaacaaaccggtgtttaaaatagtctacccttgaaggaatagtgatgtacttcctctctcagtggtgttgttagttatgctagaaaaacttaagcatgcttaaaggaccaagaacattaataatgtgatcacatgcattttaacgggatcagtcactggtgataacacaaaagtgcagactaataacatgctgatatttgacaaaatctaaatataatgattagtttttctctgtgtcagacatctattagcgttttattcactaatgactataatacaaaccc

SEQ ID NO: 483258 - DNA, 1000 bp, Homo Sapiens
tgaggaagacttagcaaaggtggggtgagggaaacctggggtggacagaagctgtgtgggaggactgagggatcaaggggttggtggtggcagcagcagtgggtaagtctgaggtgcgcccatcgccccagtgcggggaggaagagggcctcttcccagagctctgtgcagctccaccagaggcaagcagggagtgggagccaggggtggcaagagtctgatgagcaccaggaggggtgaggctgggcaaagagactaagttctggggcaagcattttatttgttaatacaagaatagaaattctgcaataaatatcatctaataaataacatctccaaataaataaatattaatacaacacacttagagtcatgagtgggtggggctggggggcagggccttggggagctgccaccctacaccccaaaatgctactgcattgtaaactttcaggaaatcctgtggtgtggctatggttgccctccccagcctggcaacccacagataccctgggaaagggggcagagaagaggcaccgtaatactggaagacaattcgaggcaaggtcctgatgctcagctcgggttttgtttgccactctgtgctttggagactcctgggtctggtctggtctgtccctgcccctgtgctttcagtattttctcttctggtttatagggcacctccaatgcagaccccaaccctgcactgttaatctcatctctttttgtgtagaattgccaccatgtttgtttcctgaattggatgtatagagtgatttggggataagggagcaacacccatccaaggagagtggggcagccaaagggcttcaccccagaaaggcatgtgtggtggtggcccctcaacccctgccctccagatgtgccacctgaggggctgggtgggcactggccaagtggtaggcaagaagcaggaggccatgagcgcctctgcaccaacctgaaccacttcacactccctcgagcatgacttcct

SEQ ID NO: 483259 - DNA, 1000 bp, Homo Sapiens
  misc_feature (204)..(204): n is a, c, g, or t
acacaactccgtacgtgccctctccgatcttttccaccttttggaagttctccatgaagcgccagcgagtcgggtcagcccggccctggagcgggggcctgggaaccctgcagaaggcggaccctggctctcgggggccgaggagggggaaacagggcccagtaccgtggccccgggtcgggatggaacgcagtatacctctcnctcttgtcaatttggccaacttgaaacaatgttgccgcctcccaccgagttcccgaccgccaccagaggccccgccctgcttcccgcgtttccctggctccgcccccaggcctttctattggtcaacgtcagagccggggggcgagcccagcgctcctccccgcaaatgatcccgccccaggcaagtttggttcttgggggctagacaagtttcttccccggtggggcggctgaacactcttcccaagtacctgctttgggtccaagtttcctacctatgtctctagtctgtagggatttcttgatttctaactcactattttcaccaatcctggggaaaaatatgtatcgacctaaggttaaattccacctggcccaggagcctcctttggaaaccaggaagccgggaatctcgttgcaaaggaatcctgggcctcagaggagtcgttgcctctgcctcatagcatacccgacactgtctctgttttgggatgcagggttctgtttctgtctttttgagaagttcctggtttaattcactctcccatgataaactgttgtgtctggtatgtgttacgcagctgcctttcagttagctcttgcccgggagtgcatcaagatgagagtgacccagtgaaaccagaaactgtcattgagtagcaggatgggaaagcaatgtctagggaccaggatccctttgtcagtttttcctttttcctctcctccggcccctcccaggccttctctgagggagaagaggaagggctatgcaaatgagcacccttttcttatatag

SEQ ID NO: 483260 - DNA, 1000 bp, Homo Sapiens
aaatccggagcccggcggcctgacgggtttatgacctggccgcatatgcggctcctccccccgggaaggctgggctggagcccaaaggccgggattgaacaggtccgcatggtccttgcacactcagaccccaagtgttctgcgccctgagttgaggtatccacccaggcttcggagtcattggaagggaaagatcttggaattttaagagaaaggaacctgcgtttttcatcataagattaggtgctaaagggaaagaaatccacctcaccctttcccttggttgggccggtgtgtttgtaccaaaagacagatccagagggagaaagaaagcaagaaccatcactagaagcagcaacaaaaatacccaaacccacccaagccagaacagagccactcgatctgggtttcctgttaaatgttcttaagcgaggagcaaattatcatataatcccagtaattggcagacacagggaaggatcagagtaaaatatttaatgtatttgaaagaaaacgacttggtgtcaactattctccacagtttaatgatacaacacataccagcaagtgtttcttggaaaataaccggtactgtaactctaaagatttaaatttctatgaccagcttttccacaaaaccagtttagagatcttcagttaaatcttttattctcttggttcctcagttttctcatatataaaattgattaatacttgttcttgccttccatatttgctttgagaagcaaatatgatcatggctgtgaatacaccctaataaagtgggaagcaccatgcaaattcacttaaatactggctttgtaaggactacaaagcttacctgactagggggattggctagagggctaagtgggaaagataaaccacatttccaccctcaagtagctaacagccaacagtgacacacattcatatttcaatatataaaacagaacattctatctttgagaagggataaagataagaatttagaggaaag

SEQ ID NO: 483261 - DNA, 1000 bp, Homo Sapiens
tgacaaatacaatgtgacaagggaaaaattataggccaatctctcctgtgaacattgataaaaaagaagaccctaaacaaaatattagaaaaccaagtttagcaataacaataatacagcatgaccaagttcggttggcaaggttgtggtgcattaatacaacagaacactgtaaggtaataaaataaatgaactacagctatatgaaacatggataaaatctcaatgttaaggaaaggaagcaagacccaagaattaatgagtacattgataaagttcaaaaccaggcaaagcgaaacttaggcttgattaggttgcaaactttaaggaaaaggaaattaagtgtcaaaagaatggatacccctacaggtggcgtatgattgagaaggaatgtactcctggcaatattctgcttggtcactttggtaatggttattcagatgttcttattttgtagttattcactatactgtaaacttgctttgtatgcttttctaaattttacatttcacccagtaaaaatactataatcaaactttatagaaataacacagaaaaatgagtctccaataatcccattacgttattttcttttatatggcatatattttgcttttatttcattttattaattttgctatttcagggaagttctatgagtccgcccctatgccaccatcttcctatagattaagtcctctaatcctatttctggtccctcaagtcatatgtgacaaggctaattccatctgagtcctttttggagacaagagtcttgctttgtcgcctagcctggagtgtagtggtgtgatctcggctcactgcaaccctgccttctgggttcaagcaattctcctgccttggcctcccaagtagctggggttacaggcgcgtgccactatccccagctaatttttgtatttttagtagagatggggtttcaccatgttggccaggctggtctcaaactcctgacctcaagtgatccacccaccttggc

SEQ ID NO: 483262 - DNA, 1000 bp, Homo Sapiens; identical to SEQ ID NO: 309576

SEQ ID NO: 483263 - DNA, 1000 bp, Homo Sapiens
gatacttatgtaatacgctctcagagaaccttttctcccatccgcaaagtcataattgtgtttattcatttatttatttataagagtcagggtatcactacgtcgtccaggccgcagtgcagtggctattcgcaagtccaatcacggtgcactatattccctaactcctggcatcaagcaatcctcccacctcagcctccctggtagctgggaatacccaactccatgactgtatgcacactggtgattaaaaaaaattattcctttgatgactgtgtaatggttacaaatgtatcctctgagagggaaggctgctgtggggggtttcactgcctgacatgtaacacatgtgctgcaaacatttactgaaagaatgaacggaacgccctgaagttcactgagccaggctggtctctcagttctagcaatgatcatcccaggccctagaaagccaggattgaagaggcaggacctatggacttggatgcatgccagctacaagccaatatggcacatttgtgcaaactggaaaaaggctccacttccagatggactaactagaaaacagtgagctctagggccgggcgcagtggctaacacctgtaatcccagcactttgggaggccgaggaaggcggatcatgaggtcaggagtttgagaccagcctgaccaacatggtaaaactccatttccactaaacgtataaaaattagctgggcgtggtggcacgcacctgtaatcccagctactcgggaggctgaggcaggagaatcgcttgaacctgggaggcggaggctgcagtgagccaagatcatgccactgcactccagcctgggggatgcagcaagactccatctcaaaaaaaaaaaaaaaaagaaaagaaaaagaaaagaaaacagtgagctctctgggtggacacaatgccaaggacacctggtttgatgagtagactgtgggtctgtttaaaccccacttgccttcttaaccaggggacttcctg

SEQ ID NO: 483264 - DNA, 774 bp, Homo Sapiens
tttttttttttttttttttttttccgggtggcgggggtggggtaaggggcttctcttagaaattttattggtcctggagaaaggtaaggcaaactctgcctcccgctcagagtccccccaaccctcactgtttcccgtagcgtggtcgcggccgaggtactcagggagccagaaggccttgagcttggccgtccgttaggcgccccacatatgttgagagcaatgggaacacttccagcagccaggggttaggacctcatggatcagcagcaagtcggttgtagtcagcgaaggagatctggtctcacacaatgaatcccttgcctccctggaaaactgccacagcagggtctcaatttggcttcagttgcccgtcacatagcattccttgcccgcctcatagttggtgtgagatgaggactacgtatttgcagcggaggtcctccaattcgtcattcacctcggatgtccacttcattgctgcctcgactcctgctggtccaaattcccatagagcccagattgtgcggcccaactgacgcaggatgcgtaattggtccggctacagggaggtctccgtcaaccttgggctgctgccacgtaccggagttgtagtgagccctcctgccacgtctccacggtcaccacctcctcctcagtgtcggcctctgccagcagcatgcgcagggccgcgcagcggcctcgaactgggaaatagaccacggtgtagggcggcatggtggcgaagactgcggcggcgaaactccagccccc

SEQ ID NO: 483265 - DNA, 1000 bp, Homo Sapiens
ttcagtctttttgtggcttccaaatacacccatttaattcaaataagcagctgagtgggggcttcatattaaacttgtagttttattcaggtttgattttaacaaatgtgtcggggagagagccctcagggaagggtaaagcccatggggcagggccttccagatgcctgaggagggggcaggtcccctcccctctcctcctctggggtccccatctaaaggggtttggagagagacacaggcaggcgagggggctggttcccagtctgttgggtggtgctcagggtaaagggctatgggcaacaggggaccagaccaaggatgagtggggagggcacaaggaccattttccagaatccactgctttctgattccagattgaattaaaaaaaaaaaaaaaaactaaaccacaagcagcacccacccccttctcccccaccagggctgtagtgtgaggggagaagaggagggcagcttcaccaaggccacggctttgctcgctcctggccaagggagctaggtgaagggtaggggctccctgacagattgagggggtggggaaaaccaaaataaaacgtcaaataaattgtgtaggaggagtccaacctaggaccaggccagagccaggccaggctgggggagggggcctctgcaggttcagaggatcactgctgccaccaccgccatcctaggtaggagagagaaattagtaagacaggataataccttcaacaggaaggatagggaggacagagccaggctaggggcaggaagaagcctgaaacaattaagactacagcagctctgctgaggacaacaaaatgtgaaggggacagtgagggatttgtcacactcacctgggagccagttattttgccatggccttgattgcaacagctgcctcctctgtcatggcagacagcaccgtgatctggagaagcaagagggatagccaagagatgtctgagctcaggaagaaacgtacagaacaaagctgagc

SEQ ID NO: 483266 - DNA, 1000 bp, Homo Sapiens
gcatttattattacttcaaatgacttaagtattttaactttttaagtcagctttaatgtctaatgtggtaaatattgatacatataacatataaactttttttgaggttctcaataattaataagagtataaagagtttctttaccaaaagttctagaaccacatatacagaggattatgaaggtactaaatccttgttctggatactttgtctgtcagacatataaacatatgttttgtgctgtgggatggaggtcagcaacaacatattgctaagtcacatctactcaagtaaaaactaccatgttttctctgttgccttgtacaggtgaaaacataacaggtatgggttccataaggtacattttaggatgtcaaaacctgaaagggatgggtgaaaggatgtcatcttctgatccaaacagctccttgtgcgacgtgatgaaagcatcatttccagtttattcgacttttctgtttagacttattcattatagcccatatatgtgataaggactaagaacccagtcttcaaggtcctgtcgagttccaaagaagtccacccctcagaagatcttgttaagacccccttaagttggaggaggcagaagggcaacaacggcggggaaggagaagtcaagacgtctggaaagaattacccagtcctggcttcgagcagcccattgaaccagagacttgaaacagccccagccaaagacttttctcccaattctgcgcttcctgggttctgctgagtcttccacaggctttttttttttttttttttttttttaagacgaaaaagagattttctgttatcgggggcagaaagatcgggccaggggtccctgacgcaggcggtggcacccgcagataggagcgggaggagggcgcgcatccctcctctcctcgccgggccagcccgccggccgcccggaggcagggcgtgcgtggggaccgcgcgctgcgcttcggcagctgcggcgtccccagagccaat

SEQ ID NO: 483267 - DNA, 1000 bp, Homo Sapiens
aaccaaaataaataaatcagatctgtccctgtgaaggtcagagtgataaatgaggggcagctggccccttggccatggcctggcccctcacccccagcccctcctctccctcttctgacctgctttggcacagcaaagaaaacgatgcatcagaaagtctccattgggttaaaggagaaagaaagagtggttggggtggggagggagtccaagagaggaggtggagggttaacaggaccaagacagagcagccagtgccccggcggtggctacctgagcggggcttcctggctacacacagactctgtgggctccaggtgctgcctgggcccaggagggtgggtggggcatgcttgggccccacacacagcctggaaccctcgaaggaacagcagataatggacactgcagagactgaagctgccctttctgtgccaggtcaggccaaggctctctcctgccagctgccccgggtcatcctcagttcacgccacggctggggcccaccctagaaacctctgccagccatggctagatccgactccaggctcctctacagattctaaggctcaggctcaagatgaagctatcctagtctcaaatacaggagcctgtgccttgctgggtgacagcggaagccagcacacaaggcccagttcctatcctagtgggtgagactggtggggaggattgtggccagagctgacccctccccaaggacatccctcgggggctacctttcctcctcctgctccccccggcctcctggaaaactgctcagaagtcagcagagcctgggcagcgtgtggcctgtggggcagccaagcactggagggggacgacagcctaactcctatgagagcagagggaggggtggtggcacagcgaggaggacggtggtgtgggcagcgctgaggcactattctttagttgagaagcaaggggcagtcatgggtgtggagagggcagtggcccaagcaaccctaggcagcatctacga

SEQ ID NO: 483268 - DNA, 1000 bp, Homo Sapiens
ggatcctggcctgagggcactgcccagtggggcagcttcctgtgtgggaggagaggaaggtgccaggggtgcagaacacacagctagtacctggaatgggagcctagtaggggtcactgcccaggaggtgagggggtcccctgtttctcccagaaccttgggaccacaggcagccctgaagctggggctgggcagggggttttgggggctgagcctagtgccagcctgatgccagtctaacgccaccctgcctggagtgggccccccagccagctgcgcctgtgcctgccagggtagggcagcaggaggctgtcagtagctatccttgggccaaggccggttgcgctgccagttccggtcactgtggttgtgctctgagtcctgggctagaagccggtcttgggggtcatgcccgttagcactaggcagccccgaggtgtgttggcggtgaggctggtacaggtcctggtaggcatctgcatagtcctcctccaggtggcgggagctacgctgtgaagatcctgtccaggcttggcgggagctctcgctggcctcatcagagggcatcaagctgtcccgctcaaggggggagtgctcctcgccacgctcccccagcagctgctggttctgggggccatacaacagctctcagtgaggcagtacagacctcaccttgtcttctggtgaggtgcgagattcttcccccctcaactctcaattccccggtaaaggaaatagtgcaaggaaaaagcatgctggagcatttttcctcttccgagagagaaaactggagcttcgactcccgcaaaattcaggctctgccttcaaggcagcctgggagaaggtttggagattgtgtttctcttgacccctaggaaactaatctctgacgtatccatctcattgattgattccctctctcctcaggaagttcctttgcccgtctgtgctagctctgtacagcagagctgagagttctacaatcctttggcatgctgaa

SEQ ID NO: 483269 - DNA, 1000 bp, Homo Sapiens
aagcttagttcttcgacaaagtaatacaattgttaaagccctcaagcaaggttaatccatgaaaaaagagagaaaatataagctgccagtaccagcaacaagtatattttaactgtatactacatatataaaacactgagcatgaagaggaggaggaagacgggggaagaaaaacatgtgttttggagccatccagaagaactatattccagattccattctagtcaatttaatccaatatgcatttgttggaagagaatataaactactattagtttggtatgaaaggcctagaaggaaaaagcacatgaattttggagttggacagagttgagttcaaattcagtctctagcttgatactaaatgtaggacttacggtaaattattaggttggctcaaaaataattgtggttttgccattcctttcggtggcaaaacttgcaattacttttgcaccaacttaaatatataacctctctgagctcccattttctcatctaaaaaatgaaataataccaacctcacagcactgttggaagggttggggtaaagcaccaagtacgtgggtagcttatatcctacagaataattttcaccaacatgacccatgaccatgaagtttatggtttgactatctgtaggaagggtacaaaaatacatcatgcaacaaggtcattcatttggaaatgtaatgctttctgaaaaacttgagcattcacttttcttcacttgcctgttctaataagagaggtttggtgtggtgatttttcaatagaaaggatgttaccaatatataaataacataaaaggatcacatgagaattaaagtgaagtaacttaacatacaattttcattctaatcttatacaataatttttcttgactattgatagatcacaataaaggtatgctgatgatataagttattttaagactttggggaaaaaggcttccgtctctggcattgaccttattgtggaggaccctccaaaatcttca

SEQ ID NO: 483270 - DNA, 1000 bp, Homo Sapiens; identical to SEQ ID NO: 309581

SEQ ID NO: 483271 - DNA, 1000 bp, Homo Sapiens; identical to SEQ ID NO: 309582

SEQ ID NO: 483272 - DNA, 1000 bp, Homo Sapiens
  misc_feature (485)..(485): n is a, c, g, or t
aacattaatttttttttattaagaagacagatattttatagtacttcttttttttcttttttttttttgtaaaaatggtatacatgaaccaatacaaaatgcgaatgggaacatatggatatggagtttcttacactgtaacattgtccatgtacaccttaaaaacagaactggcctaaagggaaaaataagacgtcggtgtgactaaagaacaagcttatttggcatcaattatacatccttcattattttatattcctttaaaaaacacaaaaaacaagtttgttctttcttcactctaaaaaaagtgatcaacctgtacaaagtaatactcaacaatacatttcaaacagtgcactgtatacttaagaaaaaatacataaaccaatatacaactaaaatccataatttcctgtttttgctttgttttattattattttttccaatgtgtggggcctacactttgcaatctacctgagacggnaaacaccaatcgcaacacatgaacctgagacatgtcaacattgtaagccataaagttacatcaggaacactgcactactgtacacttttcaaaacagaaagatgggaggtcccaaaaatgagatgccaattctgtgagcaatggtgtgattttttttttttgtttttgtttttgtttttctttttttctaaaaagaacaactgaaaaaaaacctttcaacaacatgctaaatgattctcaccctttgatatgattatactatggtcggaatgggtgctaagggctcggaatagagctgcagattataaaattcattgaaaaagggatgttcattgtggctttttgtcttggttaagtgcctagggataggggaggggtaaataaaatgctgctcgataacggattttcttttacataccagtccgttcccaaaaggcccccatattgcaatggttctatcaaaggttaaaataaagacaagaaaaataaacatgttttcaaataacaaagagttg

SEQ ID NO: 483273 - DNA, 1000 bp, Homo Sapiens
cccacctctgcctcccaaagtgctgggattacaggcgtgagccacccatgcctggcttcaattcttaaagatttgaattaattgagtccctagattagaaataatttttttggttacagagtcccatcagttttctggaaaaacggacaaaaggctaaagctagtttcattcatcacaaggtcgccatctcttagttctctagtttcaggctatttcacttgctacaagatttgattttaagagagatctgtatggaagcattttaaagttaatgtccaagattgagctcaaatgcaatgtggattcttctttattttgaaatatttatagcttttctattttttggcatactcttaatcgagcatgctgccgattgctggtcaattggcttcgacacagtagtccagggccacagtcgcaacgctggaagatttctggagcttgagcagtgtctttatgccctcttctggagcagacctgtccctccaaaaggactggcttacaaattttcgtccaaaaatgacgagcacagcaaagtccagggccacagtcaaaagttctcagacaactttctccctcttgtcctgtaacaaggttaatgtgggctttagtgataaataaggaaagtggcctgctgggggtttgctactgggataagggaatgggacctatgactgacagccacaaagtaaaaacagacacagcacgcaggtctcacagagctaggtgttacgctaaaagcagtaatgccatggcgactccacccctacccatcagaattgatcgttgttactggctgcagactaccttaggctactctctacgtgacccccacagcttcttacagaaagagataacaaacagcacatgcttcctaagtgtttctgggatggagaagaataaaatcagtctcaccctatccttaagaggctgggaggagaaaatgcatttctgaaataaaatatgctgcgaatgctgtcttacccttcctgccttgtg

SEQ ID NO: 483274 - DNA, 1000 bp, Homo Sapiens; identical to SEQ ID NO: 309584

SEQ ID NO: 483275 - DNA, 1000 bp, Homo Sapiens
tgaccctcgcactgctggagggagcccatgaattgctggtcaatatcgctcatcctctagactccatcctgcgtgtgcttcttcctacaagagctagagaggcactgactgataaatacctgtcacctgcccctttcccagagggtgaaactccacccactcccactgcagaaatgaatcttaaatggttgttaacatcttccaatcccggccctaaacgtataggcaaatcacaatttgggggcactagtgtgtcagaaggagagaaaacatagaagttatggagaccaaagtaggtgaagaatctttaggagagagcatttaattttttcaaaatgaaaaacaaaattattgtctttcttttccggccgatgggcttagctgtagcttactgaagtcgccaagcaggagagatttaaccagaggcgatgtgtccagtcaccagcatagagccatcctctgtgtcaccatccacacgcagggccttctggcagacctcatgcaatgccctccatgttaatattcatcagaaaatggataattaggggggccagcaaaactggaaagaggaaaaaaaaatgcacactctgaatggcaatgactccgttactagccggtagcgcagtgatttctaggaagctgccgctagtgtagatgttaagaagttcattttctgactgctctagaatctgtgtttctttgtttaatgaacgtgactttatcatatctgtattttcaaaataaagaataatttaattctattcccctgcctggaacttaacacataaaacacacaaagtgaaatgttcaaacatgtttctctacatctctcaacaacagatcccacatctgtcaacaaagagatattctgaccttttctatttcaaattctcactaaaaacaggaactccttctgccttacattgaagaggaataaggaagatatatgctcatcactaataaacaattttgagtgtgataattatactggtagtaattg

SEQ ID NO: 483276 - DNA, 1000 bp, Homo Sapiens; identical to SEQ ID NO: 309586

SEQ ID NO: 483277 - DNA, 1000 bp, Homo Sapiens; identical to SEQ ID NO: 309588

SEQ ID NO: 483278 - DNA, 1000 bp, Homo Sapiens
tggagacccaccaaggtaacacacaccagacgggtcttcgatcagcttcttcctgacccccctccccaagcacctcctcccactgggacgccaggtctgaggaggcagctctgaccctgctgtggccctcacaggctctgccccagccctctcccatctcgaggcatggggctgtttcctggtgtcccccattaccacccttcctgtgtccgagactcctgcccaaaaggctagagccccagcctgctttctccaacaccctcgtgggatttgcaagagaccctctgggaggaggtgtgaggtcaggaccccctgcccaaagggagtccatgctttcccatcccactcctctcagcagcacccccgcccgattccacagactccaaaatgtctccaaatgaattaaagaagccatggtcaacccacatgaatgtgccaacaagcattttcatttctttattttaaggacactgggaaaggagccagtcccctgaagagaacactctggtcaggtggtggaggccagtgggaagccatcaggcctgctttccaggaggggtgaagggttggtgcacggtgcaaggtgagagtgaggttaaaggtcagagaggaggggctgaggaggccacctcccaccaggagcagacagctggtggcttgggactggggtggagctgcgtgggggatgggaggggactgagcatggggcttcatcttcactgcccactcctcccctctccctggctgtgcctgcctcctgggatggtaggattccagcagctggagccccaggtgctgctgcggctgaggaaggcaatccccgtcagctgccttctccgttccagggtggctgtagccagaagcaggaccagacaaggacatggcctctgcattaaagcccagatcccaggcagggttggaaaggctgggcctgggaagtggggatgatgagaggacccagactgccccacaccccagcccccggccccagggccaggaa

SEQ ID NO: 483279 - DNA, 1000 bp, Homo Sapiens
  misc_feature (760)..(859): n is a, c, g, or t
gaattccttttttgaaataataacctttggttttactctttcaccagggatggatggtatgactaagacagttctggatgagttgtgtcactggaaacactgttttatacaattaaacactttgatgatttttgaggatctcatctcagtcactttcagattcttcatcttcacctatcggatatgactggatattattctgagtgtacatttttgttttaatagggcagttgtgatccatgagaatagcctaaaagagagcaaagtgcaagtatattaacttcttgtttcataaagataagatggttttaacctactgtttttaaggattattagtttgaaaactatgtagtattacttgctattaaccagtcatttggagcaatcgccagacgcctgacctaaaagacctgtagttctacactctaaaaattccaggcaattggagacagaagtggtctctgcagtattttcattatacctgtcaggggccataagtccactctgggaacttatactctatgaagcaagggacaggcaggttaggtttgttatacttagaatcttggaattggggtatggggatcctggaggtcacccagtccaacttctgtttacagacgtcattgtagcaacacaccttgaaaggatgtgctctctccttaatgagagaagccctcacatgtgagaaatgtacctaagtctggactacaacccgtttccattggttgcattcatgaatctgggtctggtatctttnnnnnnnnnnnnnnnnnnnnnnnnnnnnnnnnnnnnnnnnnnnnnnnnnnnnnnnnnnnnnnnnnnnnnnnnnnnnnnnnnnnnnnnnnnnnnnnnnnnncaaatggctaaccttgggcataagtacaggaggcagaaagattgtgtccaagattttcaagaaccatagaaaatcaaattgaatgattccaggtttatacttggtcgacaaaagagcaacactgatgctaatctatggcaa

SEQ ID NO: 483280 - DNA, 1000 bp, Homo Sapiens; identical to SEQ ID NO: 120105

SEQ ID NO: 483281 - DNA, 1000 bp, Homo Sapiens
ttgacatattccgtgctaatcctgtatcatgggtaacaggcaagttggcccctttagctcctaaaggtatagagtgtccttagcataagagcctcacaacctgtcgtttctaccccagataaaagaagacatagaatgcccagatccctctggagaatttatttgaatttaccttgaaaccataggtaggagaagttttgttatgacagagggcacttcaatagggagaccccactatggcttctttagtttccttttagggctgctttgaaacttatcattcaaacttgttgaagtaaatttctcatcttaccatattttctttcaaatctgccaactgtggtgaaagggtgtggaagagaagtgcttctgtggaagagacaagcatggctgtggcttcagcctcaggggataacattctgacaagtggctggtcctagagagctgacccctgaggcatgctgtggcccagggtcagccctgatggtggtgcccagggcctgtctgggaatgcatagaagtggctcttgggatattgatctcaaagtgttaggagcatgtcctgaacaactgtcctcagttattcattctcatccaggagttgaaagaataatggatagttgagaggatacccaaggggatgggcctgccaatctgaaattgaaaagggtttactcaactatacatctggtgctattaccaagtgtaagaaaggaataaggattctagcacgtgcaacataagcgatacctacttatgcctgtgattgttcatatacatgatggctataaatggcacattatacaaaactgagctgtgagcataatttattcatgtacttgcatagaaatttgttatacagacattaggaaaaagtataagtgctccctgcaaatattcaattttaggaaaatagtaacaaaaatagcttgagaaaattaatatcatttaaattcgacaatgtacaatgttcccatttacagatttgtgtgagcacaag

SEQ ID NO: 483282 - DNA, 1000 bp, Homo Sapiens; identical to SEQ ID NO: 309593

SEQ ID NO: 483283 - DNA, 1000 bp, Homo Sapiens; identical to SEQ ID NO: 309594

SEQ ID NO: 483284 - DNA, 1000 bp, Homo Sapiens; identical to SEQ ID NO: 120106

SEQ ID NO: 483285 - DNA, 1000 bp, Homo Sapiens; identical to SEQ ID NO: 309597

SEQ ID NO: 483286 - DNA, 1000 bp, Homo Sapiens
ccaattatcaactcaccgtttcttatttatgtcaaagtatatatttttcttacatacttaacatatgtagcattattgttcagtatttgtgtacagctcattttttttaagttactaaggttttttattaacacctcagagtagaggttatgaaaggaccctgaattgttctaggaattttcttcagtgagcatttgtgaagactcggggatcaaggttgggttaaactttgtgatgggtccattggcagtctagtcacaagcacctcctcgatccttaggtcccagcggaaaatgatgccagactcttaaactgccacaaggtagcctggaaagaactctacagtccagaaagagcctggaaagtggttttgtgagatgaaatttactcctggtgaaaatgctgtgaatattgtttagcctacaacaaaggatttagaatattgataaacatagtacaacagtggcagggtgtgagaggactgactccaattttgaaagaagttctactatgggtaaaatgcttatcaaacagtatcgcatggtacactgaaatcttttgtggaaggaagagtcagttaatgtggcaaatttcattgttttcttttaagaaattgtgacaaccacttcaatattcagcaaccatcgcccttatcaggcagcagccaacaacatcaaggcaagacccttcaccagcaaaaagactaagactccctgaaggcgcaggtgatcattagcattttcagcaataaaagatttttctattttttctttgttttaaataattgagcttcaagtaagggcagcaagtagtttttcttctttttctttctgtttttcttttttcttttctttttttaaagacgtgttttgccatgttgtccaggctggtcttgaactcctgaattcaagtaatcaacctgtcttggcctcccaaagtgatgggattacaggcatgagccaccgaacccagccagcatcaagagttttaaaattaagga

SEQ ID NO: 483287 - DNA, 1000 bp, Homo Sapiens
ctcaacataatgtttttgaaatccatccatgttgtgcatatctcaagtttgtttcttcctgctgaaaagtattcttttgtatgagaatcatcataaaccattacaatatgtgaccttttgtgtctgatgtctctattttgtagagatgaggaaccaaaagaattaaaatggaagcttggagaatgaacttgggattctgaagtgtctagaagccgtatatgttcagatcttggcagcagccaaaatgaactattttggggccactggggtggtctatagggtccctaccactggggcctaagtttagttggaatgagggtgcctgatgatctgtgtaaactctaggatgggcctcatttggggatgtgggtagtgtgtccatatttccctgagaaggattggtcttgagtctaccctcagattttttttttttttttagacagggtctcactctgttgcccaggctggagtgtagtggcatgatcacagctcactgcagcctcaacttcccaggctcaagcgatcatcccacctcagcctcctgagtagcggggactacaggtgcccatcaacacacctggctcctggctattttttgtagtttttcatagagacagggttttgccatgttgcccaggttggtcttgaattcctgatccttctgcctcagccccgcaaagtgctgggatttacaggagtgagccaccgcacccagcctcattctcagatatttgctgttgttgagcttcttgtttttgccaaatatgcttgcatttggctttcttgagttttgctccaaggtttttgagccaaacctacagtacttttggatctatttccattttggagaccatatctttctgaaggctggggtttgggtatacgttcttattgaacaagttcagatcttccagttgtttctcagtgaacgtagtttgtttcttttgtgaaggcctctggggcttgcctttgggaagatcctctgagcctaatctagatg

SEQ ID NO: 483288 - DNA, 1000 bp, Homo Sapiens; identical to SEQ ID NO: 309601
  misc_feature (716)..(815): n is a, c, g, or t

SEQ ID NO: 483289 - DNA, 1000 bp, Homo Sapiens
atgttggggattcattgaaagatttatttgaacaaagagttgtaaggttaaaacatgttcgagaatcgtttcctagtgtaatctaatttgacaaataaggaaacaagcttgtagaagttaagcgacttgttcaagtcaatccagtcaataatgccaaagctaaggatagaaatctatcttctagcccaatgttctttggataacacataccatgtccacaatttctcaatatagggagcaaagcagctttctagtcattacatctacttaatacagtttattcttacctattgtaaacctggcttcctatagaatatgcgttctttgcccagactgttatttcttaacatttgaagcattgtttcttacacttaaggaaaaatccaaaattagggacccctatagtttgctttaagttggttactggtagtaatcttaaattttataccagaactcctcactaggagaactcaaggtagtcaatgcttattctccatggctctgctctgtcctgtgaactatagtttctagatgtcacttgtggtaaatccagctacagatttccttccacccttactttaatcaaaatctatcaatccattccttctgggagaaaactttgtctgtaatgaaggttgaattttaaaactctggaaaagggtaccatagtcccagtctagaattacccatcaaacacatttgctatagtcctactatgtattcatttttagggggagaactgggattgatcagtatttataaggatagtatagtttaccttttaggtaggcaattctaaaggatccatcaataagaagctctaggattaaaaataaaatacctctatggaatacaaattaggattcttgggacagtctggcacaaaaaggcattcagggacgggaagcaaagacaggcaatgtttggcttgtaacaaacagaaaagccctatacaaaatgaagcagcgctaatgacgcttttactgttcagtgttccctc

SEQ ID NO: 483290 - DNA, 1000 bp, Homo Sapiens
  misc_feature (14)..(14): n is a, c, g, or t
  misc_feature (21)..(21): n is a, c, g, or t
ggcccaagagcagnccgaggnagaggccccccttgcctggatggcttgagagactgatctacagagacagaggctccagcttctgagggctgtgccccccttgcctgctgggcactggcaccggttcagctgataggagtgcagggctcccccttcaggcggcagctgactcagcgtctgaaaggtggttcccacggttcaggtttctctctagggccaaaggccatgccatccatgcccctcccccaagtgggtcagtgcccagggcattgacaattagggctgaatggaagttaggatttccagtccccccacccctgccaaccagcaacacctcaggcagtcctttctgctgtctaaccactgccagcccaactttggcttggctttccactcccagaggtttccaagmcactgtagttatcaatactttggttttattttaaaacagtgaaaagaaaaataaatatctgaagaataagaatacagggctgggtgcagtggctcatgcctgcaatcccagcactttgggaggcggaggcaggtggaccgcttgagcccaggagttcgagaccagcctgggcaacacagtgagacccccctctttacaaaaaatacaaaaattagccaggtgtggtggtgcacctgtagtcccagctacttgagaggctgaggtgggagggtcacttgaacccaggagtcggaggttacagtgagccctgatgggccactgcactccaacctgggcaacggagcaagaccctgtctaaaaaaaaaaaaaaaagaatacaggagtggggtggggtagtggggctggagacttgaggtgtcctggctttggtagtcttgagtgggggcgccagaggcctgggatctgcagctgtgctcttcccaggccaggccctgccccgtccccactgggaggtctgggggctccgccagtctcgcctgcccgcggctcccaggcggggcgctgcgtcagcggaacccgcgccgggat

SEQ ID NO: 483291 - DNA, 1000 bp, Homo Sapiens
gagttcaacctgtccatttttattcaaatcgacttcatttagaatttcatggagtgtattttcatccatttggacattgatactctctaatacacatggaacatcaacaatggtaataaagcctttctggtctgcatcagacttacaaaatctcttcttatacctgtcactgtctgaaggcagtaggctaatttcagagccatctgttaactgttctgatcaaaatttagtctgtttcataatatagaaacttcctggttgtttcaagttgttcctgtttcttataatcatctcaattctgttctctgcccattagttcaacaatcctgagtagggcttgctctgctgcccggacatttagaaaggccaggcgaggctgaggcaggcagatcacctgaggtcaggagtttgagaccagcctgaccaacatggagaaacccaatctctactaaaaatacaaaattagccaggcgtggtgatgtcctgaccaacatggagaaacctaatctctactaaaaatactaaattagccagggtggagacccaatctctactaaaaatacaaaattagcctgtaactccaggtactcgggaggatgaggcaggagaatcgcttgaacccaggaggcggtgattgcagtgagccgagatcataccattgcactccagcctgggtgacaagagcgaaattctgtctcaaaaataataataataataataataagccaggcgagtacaacgtgaaatcatatccacagtggtgcaggaatactccttaatcccatagttcacctctgcttcaatatatggaaattctgacacaagacgtactccaacaataggccaccttttgctagtcacacttgccattgtggccacctcaaaagccttatcaccataggtggcagcaagatggtgtgccccctcgctttcaagtccataatcctggacaagcttcatgttagagtgtggggttccaatctttacccccttgaaggaa

SEQ ID NO: 483292 - DNA, 1000 bp, Homo Sapiens
gatcttcctttgtcactcaggctggagtgcagtggcgtgatctcagctcaccgcaacctccgcctccggagttcaagcgattctcctccctcagcctcttagtagctgggattacaggcgccccctatcaagcccggctaatttttgtatttttagtagagatggggtttcaccatgttggccatgctggtcttgaactcctgacctcgtgattcgcctgcctcggcctcccaaaagtgctgggattacaggcgtgagccaccagcctggcccactttttcttttcatgagggatgggatcaatatactaaagtgatgattctaaatgtcattcgttttgcctattttataattcaagatattactttgcttcccaggtattagaaaatttggaataaattaatgaataatgacagacatgttggaagttacaatctacaatatttttgctcaaatgatattttcacccaaaacacattttagcattcacatatttgttttctttcacagtttgactggaaatcaaatgtcacatggcctcttccagttttaatctgtggttaacaacaacaacaacaacaaaataccacatgaagtgactgcacttactttataagaaaactgcttcatagaaaattgtttaatatgttcaagaaggggagaaccttaataactatgacttagattaattaaacttcgtatttttttcctttttggtctgatttttcttgtggcataattaattttttcactggacacaacatggtgcttaacatggtttggctatgtctccactcaaatcttatcttgaattgtagttcccgtaattcccacgagtggtgggagggccctggaggaaggtaattgaatcatgagggcagttacctccatgctgttcttgtgagagggagcaagttctcacaagatctgatggttttataaggggcttctccctcccccagccttcactctgcacttctccttgctgccaccatgtgaa

SEQ ID NO: 483293 - DNA, 1000 bp, Homo Sapiens; identical to SEQ ID NO: 309603

SEQ ID NO: 483294 - DNA, 1000 bp, Homo Sapiens
  misc_feature (410)..(509): n is a, c, g, or t
  misc_feature (740)..(839): n is a, c, g, or t
  misc_feature (977)..(1000): n is a, c, g, or t
aaaaatgtatcaaacttttcaaggttaccaagaaaaaagcagaagaagaaatttatttttaatttcaaaatgttttgggatttcatcattttgatttttaaaagttaacatagaaaataataaaaaatgaaacagcttatctgaatataagctgacccacagtagtcacactgattacagcaggccttctggtcacatagggttgtctccttaaatagcagaggttgtctacagcttctgaattagcatggcagaagcacctcctcctccattgcaaaaactggcaagaccgtattctccttgcttcaaggcatgagtcaaatgaccaacaatcctggctccagacatcctaaaattaagaaagcatttacttctttaatgaagtacagaatttatgactaaccaaaatnnnnnnnnnnnnnnnnnnnnnnnnnnnnnnnnnnnnnnnnnnnnnnnnnnnnnnnnnnnnnnnnnnnnnnnnnnnnnnnnnnnnnnnnnnnnnnnnnnnnatttttacctacccaattggatgtcccagagaaacagatcctccattgatattcactttttggggatcaatctccaacattttaatgtttgctagtacaaccagactaaaggcttcatttacttcccacattgcaatattttcttttttcaatcccatatctttaagaaccttaaattttttaaaagacagatgatgttcaaataattagcaatcacaacttactgtcatnnnnnnnnnnnnnnnnnnnnnnnnnnnnnnnnnnnnnnnnnnnnnnnnnnnnnnnnnnnnnnnnnnnnnnnnnnnnnnnnnnnnnnnnnnnnnnnnnnnnctttgttctcaccatagatgcagcatatacaggagcaattggaaaatcaataggttctacagcagcgtcagcaaatgctgtttaaaaaaagggggggggggttgttaaaatcttttttttttttactgtatagaatannnnnnnnnnnnnnnnnnnnnnnn

SEQ ID NO: 483295 - DNA, 1000 bp, Homo Sapiens
  misc_feature (452)..(551): n is a, c, g, or t
  misc_feature (690)..(789): n is a, c, g, or t
  misc_feature (993)..(1000): n is a, c, g, or t
gtacaaacaaattatgctttattcaaattatggaatactctatagcggttaaaattaacgatttagagctccatgtttcaatgtggataaatctcaagaaacataattttcaataaaaaaatgcaaattttacatatgataatgtatacgcaaatataaattcacaaaacaataggacataagtttaattgatgtatgtagatatagtaaaagtacaaaaacatgtatggaaacaggacataacagcttctggataacagttatatttgggggtgggcttgggggaagaagtaaaagagaatagtttgggaggtgggtgtttctgtgatttttttttcttttacaaaaagagagtcatggagcttccagtgatgtgatcctggcagaaaggcaggttttaatttccccaaaattcctcctggaaaacaaacaaatcaattaggatagccaannnnnnnnnnnnnnnnnnnnnnnnnnnnnnnnnnnnnnnnnnnnnnnnnnnnnnnnnnnnnnnnnnnnnnnnnnnnnnnnnnnnnnnnnnnnnnnnnnnntaagttctttggagatcatgacttacatctgctgtcaaaatagttcacagatacttcatcccagggttaggcagatttatcttcaagtcatcagcttagctggacactgcagggttctcctattatgtgataggcaatnnnnnnnnnnnnnnnnnnnnnnnnnnnnnnnnnnnnnnnnnnnnnnnnnnnnnnnnnnnnnnnnnnnnnnnnnnnnnnnnnnnnnnnnnnnnnnnnnnnntggcaatgtggagtctttacttactaagaagtttgaagctcgcaagtgttagtggaagttgtggatgtgatgaagacatggcgggaaaggacaaatccaagaaccaacggaagggctgagcacagaaccttgaaggatcaatcacagtaggggtgggaagaagaggagcctgaagagaagagcagagatgacatgactagagannnnnnnn

SEQ ID NO: 483296 - DNA, 1000 bp, Homo Sapiens; identical to SEQ ID NO: 309605
  misc_feature (876)..(975): n is a, c, g, or t

SEQ ID NO: 483297 - DNA, 1000 bp, Homo Sapiens
gtcaacaaatcaagcaaatctctccttctactctccccaaatccaaacattcctgcatatttgaaacaaattttcctttcctagaccagttgcttaattcattatctacttctccaatattgagtaaatgtgtctttaggggcacacatgtagaatattaatccacttaaatgggctcaaattctaagaaaatattaactatactaaatgttatgggaagaaaatacattgaatgtgagttaagggccagtgtttagcattcacatccaggattctctggatctcagttgacttgtcctatacatcaaaatatggcaatttttcaatcacaatactgctaaatgttattcaggcataaagtttcttacccactgttccctcaaattcatttttgaccctagtattggcaatagccctttgctatttatataattaaaacttttctttaaatttcaattgacaggaaaaagagtcattttgtactctcttatctataaccatgtctcacttcaagtcaatgctacaattgtcacttttattttgaaaaggaagctcagaaggaaaaaaactcttagagagatcttctaacagaacatttttcttcactgatagacatccaaggccattccatttctaaatcacacttatccctcaatcaagtcagtgactggatcatctcctaaggtttcacctgctttgcatcaggtaggtgagatgaaagtgattttatgggtagctttcagaaaaatgtactgcactgaagtgacaaagttctgtcttgcctgttctctcacaaaacagcatatcaattaaataatgttttctttacaatacagtttcataggactttccatttgtttcagagtgccttaactttttaaaaaaagacactgttaacaaatacaattatttctcttaaaatccactcagccagcatttttcactatcctataaaggctttaaatgtcacagaatgtatgataatttgctcctaacctac

SEQ ID NO: 483298 - DNA, 1000 bp, Homo Sapiens
ctcgagcgtggcctgtgctctcctttctctgacctgtgccctcggcctcttggcctccatcgccatgacctttgccacccagggcaaggcactgctggctgcctgcacttttgggagctctgaactactggccctcgcacctgactgtcccttcgaccccacacgcatttatgtgagtacctaggcctggagtaggggcaccaggccctcgcacgggtgggaagggctcttggaatccaccctccacccccaactccagccagccatctctgccccatgccccgcagagctccagcctgtgcctctggggcatcgccctagtgctctgcgtggcggagaacgtgtttgctgtacgctgtgctcagctcacccaccagctgctggagctgaggccctggtgggggaaaagcagccaccacatggtaagttccctccacagccctgactccccgaatttcctgggagcccctgccagggtgcccaagctgctctgccccacccctatgtatgggcccccaccttgagaaatggggcagaagttttctccccaggagcaaagggagaggcctggaggctgggagaggtgagatctcccagcagagtcacacagctgacacctggctctcctagggcccaggatgagtcttgagggaggggcaggggtgtctgggctcgcactgagggcattgcaaaggtcaggcctggctcttgcagtggagtgggtagtgatgcccctttgcccccagagagccttccagccctcacctccttccatttcccggatgtcctggaggaggagacccaggctgagaaccagtgggtctggcagcctcctgtgtctctgcagatgcgggagaacccagagctggtggagggccgtgacctgctgagctgcaccagctctgagcctctgaccctctgagagatgatgtcctgcccaggcccgatggccactaggaccctgcaagcaactctgctctgtgaccaggccaggattcct

SEQ ID NO: 483299 - DNA, 1000 bp, Homo Sapiens
  misc_feature (121)..(220): n is a, c, g, or t
  misc_feature (461)..(560): n is a, c, g, or t
  misc_feature (771)..(870): n is a, c, g, or t
cgcatgctcctccggcagccactcggcctcctggctatgtctcctgggggaccacctgcatgagcttctgacacaggacggtcgtggagactgtcaggagagaagacagctgtgttagccnnnnnnnnnnnnnnnnnnnnnnnnnnnnnnnnnnnnnnnnnnnnnnnnnnnnnnnnnnnnnnnnnnnnnnnnnnnnnnnnnnnnnnnnnnnnnnnnnnnntaccacgggctgtgggccagcgagatactcacagatgccctggaggagccacttgggcttgtttttccaccagaccccgaagaagtagacgggcagcccgctgaggatgatggtgaagccgatgccacactccacgggtgtcttccagaaggagacggcgatcaggaagaggcaggccaggatgaagaacacaggcagggccaggttcacctggggcagaggacagggcctgggtgagccnnnnnnnnnnnnnnnnnnnnnnnnnnnnnnnnnnnnnnnnnnnnnnnnnnnnnnnnnnnnnnnnnnnnnnnnnnnnnnnnnnnnnnnnnnnnnnnnnnnngcctgggtgagcgggaggccccgggctcaccttgatgggccgctcaagctcaggctttctgtggcgcagccagatcatgccgatgatggccagggccacgcagagccagttgaagaagctgaagaagttgatgacggagaagatgtccttggagaaggcgtagagcagcgtcatcacacactggaagagagaggcggctggctgagccctnnnnnnnnnnnnnnnnnnnnnnnnnnnnnnnnnnnnnnnnnnnnnnnnnnnnnnnnnnnnnnnnnnnnnnnnnnnnnnnnnnnnnnnnnnnnnnnnnnnngtagggcacagggccgtgcagcaggcttaccgtgaacacgagggacggcacgggggtgaggagctgtgggtggatcatggagaggatggagggcaggtggccttcccgggaccccacgaagaagagcctg

SEQ ID NO: 483300 - DNA, 1000 bp, Homo Sapiens; identical to SEQ ID NO: 309607

SEQ ID NO: 483301 - DNA, 1000 bp, Homo Sapiens
cgaaggggctgtcgtgtgtgtggccctgatcttcgcttgtcttgtcatcattcgtcagcgacaattggacagaaaggctctggaaaaggtccggaagcaaatcgagtccatatagctacattccacccttgtatcctgggtcttagagaccctatctcagacagtgaaagtgaaatggactgatttgcactcttggttctttggagccttgtggtggaatccccttttccccatcttcttctttcagatcattaatgagcagaataaaaagagtaaaatggtttccttcccttctgtaacttggagcaggaagtcatgggggcagagagggaaaggaggtggttacttaaggccccaatctaccaagtcttccccaccacttctcccttgttttccccctcttctactacttatttcaaacttctgggatacaatttcagctaaaacgtttatttctcactcaaaacttatttcccctcaaccctatacccaaagaagaaataaaatcacagatacataacagaagtatttgaggtaccctctcatatatgcaaacaaatgcagactaggcctcaggcagagactaaaggacatctcttggggtgtcctgaagtgatttggacccctgagggcagacacctaagtaggaatcccagtgggaagcaaagccataaggaagcccaggattccttgtgatcaggaagtgggccaggaaggtctgttccagctcacatctcatctgcatgcagcacggaccggatgcgcccactgggtcttggcttccctcccatcttctcaagcagtgtccttgttgagccatttgcatccttggctccaggtggctccctcagtctggactctaccacttgggtctccagattttctgttacgtccttgtgggtcaggatatttctggaagtcactgtgaggtgaaggcaagagggcagtagtagagtgctcccctgggtgggagaccctagacaggacaggacctccctct

SEQ ID NO: 483302 - DNA, 1000 bp, Homo Sapiens; identical to SEQ ID NO: 309608

SEQ ID NO: 483303 - DNA, 1000 bp, Homo Sapiens; identical to SEQ ID NO: 309609

SEQ ID NO: 483304 - DNA, 1000 bp, Homo Sapiens; identical to SEQ ID NO: 309610

SEQ ID NO: 483305 - DNA, 1000 bp, Homo Sapiens
tctagataactgtcttcaaaagaaacaaaaattcagactcttataaagtttgatttgtggtctttggggtttttttgagaaaggtctggctctgtcacccaggctggagtgcagtagcgccatctcagctcactgtaacctccacctcctgggctcaagtgatcctcccacctcagcctcctgagtagctgggcccataggtgcacgccaccactcccggctcattttttaaaaattttttatagataggggtttttccatgttgcccaagctggtctcaaactcatgaacttaagcgatcttcccacctcagcctcccaaagtgctgggataatagacgtgagccaccgcgcccagcctgattcatgttttaaaacgctgtgtgaacaaaacacgtttttaaaccaaaagcagcagtccatgggctcctgtatgctacctctgaggaagcaggacattctcttttccactagtcccacattgggcatttatgacaacctgagagcaccaagcgcctgagacagaaggggcagaaagaaggcagaaggaaaccaaagacaaatttctgcatctatttcagaatgcttcccaggtctcccatctcttccttttcacttctaaaccacagaagttgactcccagcatccaaaattcagaaatgaacctaacatcatcatgatccagtcttattttgcatcaggtaatccttcgcaggctagtctatgaactcaccccatatgtattacactgtttctacaagatcacatgattccaatataccttaagtgaactctgagaacccaatttggaaataaacctgtatgctgacagtcgtgttctcagcatctctcataaataccaatattctgcaaagtcatccactttcaaaactcccatgatttcaaaacttccatcatccttatatatttcttcctccctgtgcccttttattagtcatcatgtactggtgatttttttaaacaacacttacctatcattc

SEQ ID NO: 483306 - DNA, 1000 bp, Homo Sapiens; identical to SEQ ID NO: 309612

SEQ ID NO: 483307 - DNA, 1000 bp, Homo Sapiens
atgctcaaatctttttgtagattgtatagtataatactattaagactttaaaatcataatcattgtaacaaaatgcatacaaatctgcttttaattgacacaaaacatttgtgcccttgaaaaagtccacacataaaaaaagaacagaatgaaatcaccaccctagtacccttatgttctgaaagaacttcctcctcacctcttagtcttggtgaaaccttgaacttttctgagtcactttccatgaattgaggggcatgcccagcccatgtggtccaaggacaaccttccctaacccaggctatcactaacaagtcagaaaagctggtgctccagcatcctgcgtgctcctgcattcttgggctgtgaacaagctacagccccctctacttggacaaagcaaacttccccaagttaaccacactagggatggggagatggatatcatgttgcaagataatcgcgaactattacaaagaagcctctttgaaaacatccagacagactgccactgggttccatgctccctgtgctggaagcacactcatgtaagaccatcccttacacccctccactaagcccaacatggtcggcaagcaaacctttgtgtaaaggaccagatggcagatattttcagccctaggagccatccgatctgttgcaatgactcaactctctgccattatagagagggagcagccacaggccgcctgtgagcaaatggatgtggctgcatgccaataaaactttatttaaaaaaacagacagggggccagagttggcctgtggaccatagtttgctaacccctgactaaagcaatgattacacaatcctttcctctgttgagtcatcaatatctgcttccctagaactcgaaaccagtgagtctaggggtgctttatcatattcttccaagtagagaagaaagttgctctgctcccccaggaacttgtttccaagtgaccctgacctagacccctcaaccctttaccatctgac

SEQ ID NO: 483308 - DNA, 1000 bp, Homo Sapiens
catcttccttcttccacaacctcccaggcaggaatgggccagctcctcctccttcccttcagattcctccacaggaagtcttttcttatcaaactggaaccccaagtaacttgctgagcaacgggcagagcaaagggctatagcccctggactcatggtggctagaattgccaggaagtgggtgaggccacccagagggtggatgctcatggctgaaagccatgactcctcccctttcctgagaatagtttattaccatgtcctattggttctgcctatcaatgatgtctcttgaatctttaccccatctctactaccaccgtgctagtccaagccaccatcactttctgcttgggatagcgtgattgtgaactggtccatacttgtctactctagcctacagttctaatctcctcccttcccccatctggctgtacagctgtggtgctttgtgacttggccacaggtcggggaaggagaaggaagctgctgcccccgataaaacctgaggcttctgtatctttttggatatggcatttacccacttcctccttctaggaccttgggcggcctcaaccagccatattggtgcagcagcttcctcactcctcctccgtcttgagccaagctttagtgtggccacagcagtgcagtcagtgctggggacagggtggtgaatggaccttggtctaggtggcaaggagattggggataaagtggagttattccagggaattttgactcacagtttctgagattatgcattagctgttcagttgaaggtaggccctcaatcctttttgggtgatggagctctttaaccattaagacttgattctggttgggggctttgcctaggggagccttccctgactcctcaggctggccgcgtgggctaacacacgtaggcacagcattgagcacactgtttactcttggtccgttcacaggattgtgtaaatgagtcccttgggagcaaggctccttgctacagccctag

SEQ ID NO: 483309 - DNA, 1000 bp, Homo Sapiens
gatctaattattttacttgcaataattcattacagaaataattctttgcaggatctgaattttaggggaatacatgtcatgaaatctgaggatttcttaaagattatcatgctcccattaggcaagggaacactcatggttgttcttgtctttgccttcacctaagaaaataatgaagggtggtaaataaggataagaaggaattcatttatttattcattttcctgaaatacaaatgaaggatcgacaatagaaattaggaaaaaaaaaagaggggaagtgtagatatttcaaggacatagataactaatgagctaatgagcattgaatcactactatatgtcaggcacagtattaagcattctacaggtatttcattcaatcattataatgccaagtgaagtagggatccattatcctcttcatagtgaagagaaaaagaagcagttaaatatcttgactaaggtcatagtgaagagaaaaagaagcagttaaatatcttgactaagctaataataagtggtgaaaccgaaacaataatcttgtcaatctgacttagctctcagacatatactacgagcatgtttaaccttatttaaaatatttttattttttatgtgtttccccatgatattgagcagtaaaaccttacaataaaaagagactaggtggttttcctttagggcaactaggaagtagggaatagggaaacagcattccattccacagtctactttgtagagagagaccagacagcaggcaacagtagaaaagaagaaaataaaacaggatgttttaaagacctattataagcagataaacaaaggaaaaagcaagaaaaaaggataaaattttcctactttggtttttttattttatttgttttgttgaaattccaaaacttattctgagtattatttattacttgcccttgaaaacattaaatcgatgatctgttggaagattaagccatgagtgtacagtatatccacttaagatg

SEQ ID NO: 483310 - DNA, 1000 bp, Homo Sapiens
  misc_feature (1)..(1): n is a, c, g, or t
  misc_feature (10)..(10): n is a, c, g, or t
  misc_feature (38)..(38): n is a, c, g, or t
  misc_feature (42)..(42): n is a, c, g, or t
  misc_feature (49)..(49): n is a, c, g, or t
  misc_feature (51)..(51): n is a, c, g, or t
  misc_feature (73)..(73): n is a, c, g, or t
  misc_feature (75)..(75): n is a, c, g, or t
  misc_feature (136)..(137): n is a, c, g, or t
  misc_feature (169)..(169): n is a, c, g, or t
nacaggattntggaagggtggccccggggccaaaccgntggnagcagangnttggttttttcagccagcatgnancaccccccgtcggccatggtgcstgcccgccccaggccccaccaaggcagsatgcatggcnngcatcagtgtgcccaccgtccaggggtccagntgcggccgcctgcccactctggaacaatggagaggcatgytggggtgttcttggggggattagggacgggggctggggacgaaactyccaggggaaggaagggaggggaagagaggcttggtgctccttggaaggtttcgaatccccaaggccctaggtcagagatcagcttcaggtgtgcgtggcaggggcgggacccgggacctcgcctgctttcgggggstaaagcccctctytgcaagcgcctgccccagcctgggcatgggccgcttcggtgggcagaagtgggaagcatgggttttgactccctgaagaagcgtgtttgtcaatttggtacctgggagaccaggtgcaaggggacctgggcgctcccctccccctccccccggcatgtcggccataatggagtctcaaaacacgaagacactcatcagaaaggacggacacagtgtgctgcttagaatcaagggtggtcatgatcagttgactcgagaaaagaaaaaaaagaatcaaaaacaaaaagaagagaaacgttggaaaaagagagtcggccgggtgtttctggtcagcactaaaaaaaaagaagaagaagaaaaaaaaacccagtgcctggacgtcggtggtcggcaagggtagtctaccttgtaagccactctggccggacacttcttccccagacccaggggcggagacatgtgtctcagcatctgatacatgtccaggtaaggcatgcggcccctggcagcacgaaaatgaaaaaaacaaaaacaaaaacaaaaaaacaaaacgggaatgggaacagagaaccaaaggaagagaggtggggagaaa

SEQ ID NO: 483311 - DNA, 1000 bp, Homo Sapiens; identical to SEQ ID NO: 309614

SEQ ID NO: 483312 - DNA, 1000 bp, Homo Sapiens; identical to SEQ ID NO: 120107

SEQ ID NO: 483313 - DNA, 1000 bp, Homo Sapiens
catcgtgatgtcttatttaaggggaacgtgtgggctatttaggctttatggccctgaagtaggaaccagatgtcggatacagttcactttagctacccccaagtgttatgggcccggagcgaggagagtagcactcttgtgcgggatattgatttcacggaggatggtggtcaagggacccctatctgaggggggtcatccatggggacaagaagggatttgactgtaatgtgctatgtacggtaaatggctttatgtactatgtactgttaagggtgggtaggtttgttggtatcctagtgggtgagaggtggctttggagttgcagttgatgtgtgatagttgagggttggttgctgtacttgcttgtaagcatggggggggggggttgatgtggattgggtttttatgtactacaggtggtcaagtatttatggtaccgtacaatattcatggtggctggcagtaatgtacgagatacatagcggttgttgatgggtgagtcaatacttgggtggtacccaaatctgcttccccatgaaagaacagagaatagtttaaattagaatcttagctttgggtgctaatggtggagttaaagactttttctctgatttgtccttggaaaaaggttttcatctccggtttacaagactggtgtattagtttatactacaaggacaggcccatttgagtattttgttttcaattagggagatagttggtattaggattaggattgttgtgaagtatagtacggatgctacttgtccaatgatggtaaaagggtagcttactggttgtcctccgattcaggttagaatgaggaggtctgcggctaggagtcaataaagtgattggcttagtgggcgaaatattatgctttgttgtttggatatatggaggatggggattattgctaggatgaggatggatagtaatagggcaaggacgcctcctagtttgttagggacggatcggagaattgtgtaggcgaata

SEQ ID NO: 483314 - DNA, 1000 bp, Homo Sapiens
catcgtgatgtcttatttaaggggaacgtgtgggctatttaggctttatggccctgaagtaggaaccagatgtcggatacagttcactttagctacccccaagtgttatgggcccggagcgaggagagtagcactcttgtgcgggatattgatttcacggaggatggtggtcaagggacccctatctgaggggggtcatccatgggggcgagaagggatttgactgtaatgtgctatgtacggtaaatggctttatgtactatgtactgttaagggtgggtaggtttgttggtatcctagtgggtgaggggtggctttggagttgcagttgatgtgtgatagttgaaggttgattgctgtacttgcttgtaagcatggggagggggttttgatgtggattgggtttttatgtactacaggtggtcaagtatttatggtactgtacaatattcatggtggctggcagtaatgtacgaaatacatagcggttgttgatgggtgagtcaatacttgggtggtacccaaatctgcttccccatgaaagaacagagaatagtttaaattagaatcttagctttgggtgctaatggtggagttaaagactttttctctgatttgtccttggaaaaaggttttcatctccggtttacaagactggtgtattagtttatactacaaggacaggcccatttgagtattttgttttcaattagggagatagttggtattaggattaggattgttgtgaagtatagtacggatgctacttgtccaatgatggtaaaagggtagcttactggttgtcctccgatccaggttagaatgaggaggtctgcggctaggagtcaataaagtgattggcttagtgggcgaaatattatgctttgttgtttggatatatggaggatggggattattgctaggatgaggatggatagtaatagggcaaggacgcctcctagtttgttagggacggatcggagaattgtgtaggcgaata

SEQ ID NO: 483315 - DNA, 1000 bp, Homo Sapiens; identical to SEQ ID NO: 309618

SEQ ID NO: 483316 - DNA, 1000 bp, Homo Sapiens
catcgtgatgtcttatttaaggggaacgtgtgggctatttaggctttatgaccctgaagtaggaaccagatgtcggatacagttcactttagctacccccaagtgttatgggcccggagcgaggagagtagcactcttgtgcgggatattgatttcacggaggatggtggtcaagggacccctatctgaggggggtcatccatgggggcgagaagggatttgactgtaatgtgctatgtacggtaaatggctttatgtactatgtactgttaagggtgggtaggtttgttggtatcctagtggatgaggggtggctttggagttgcagttgatgtgtgatagttgaaggttgattgctgtacttgcttgtaagcatggggggggggggttgatgtggattgggttcttatgtactacaggtggtcaagtatttatggtaccgtacaatattcatggtggctggcagtaatgtacgaagtacatagcggttgttgatgggtgagtcaatacttgggtggtacccaaatctgcttccccatgaaagaacagagaatagtttaaattagaatcttagctttgggtgctaatggtggagttaaagactttttctctgatttgtccttggaaaaaggttttcatctccggtttacaagactggtgtattagtttatactacaaggacaggcccatttgagtattttgttttcaattagggagatagttggtattaggattaggattgttgtgaagtatagtacggatgctacttgtccaatgatggtaaaagggtagcttactggttgtcctccgattcaggttagaatgaggaggtctgcggctaggagtcaataaagtgattggcttagtgggcgaaatattatgctttgttgtttggatatatggaggatggggattattgctaggatgaggatggatagtaatagggcaaggacgcctcctagtttgttagggacggatcggagaattgtgtaggcgaata

SEQ ID NO: 483317 - DNA, 1000 bp, Homo Sapiens
catcgtgatgtcttatttaaggggaacgtgtgggctatttaggctttatggccctgaagtaggaaccagatgtcggatacagttcactttagctacccccaagtgttatgggcccggagcgaggagagtagcactcttgtgcgggatattgatttcacggaggatggtggtcaagggacccctatctgaggggggtcatccatggggacgagaagggatttgactgtaatgtgctatgtacggtaaatggctttatgtactatgtactgttaagggtgggtaggtttgttggtatcctagtgggtgagaggtggctttggagttgcagttgatgtgtgatagttgagggttggttgctgtacttgcttgtaagcatggggggggggggttgatgtggattgggtttttatgtactacaggtggtcaagtatttatggtaccgtacaatattcatggtggctggcagtaatgtacgaaatacatagcggttgttgatgggtgagtcaatacttgggtggtacccaaatctgcttccccatgaaagaacagagaatagtttaaattagaatcttagctttgggtgctaatggtggagttaaagactttttctctgatttgtccttggaaaaaggttttcatctccggtttacaagactggtgtattagtttatactacaaggacaggcccatttgagtattttgttttcaattagggagatagttggtattaggattaggattgttgtgaagtatagtacggatgctacttgtccaatgatggtaaaagggtagcttactggttgtcctccgattcaggttagaatgaggaggtctgcggctaggagtcaataaagtgattggcttagtgggcgaaatattatgctttgttgtttggatatatggaggatggggattattgctaggatgaggatggatagtaatagggcaaggacgcctcctagtttgttagggacggatcggagaattgtgtaggcgaata

SEQ ID NO: 483318 - DNA, 1000 bp, Homo Sapiens
catcgtgatgtcttatttaaggggaacgtgtgggctatttaggctttatggccctgaagtaggaaccagatgtcggatacagttcactttagctacccccaagtgttatgggcccggagcgaggagagtagcactcttgtgcgggatattgatttcacggaggatggtggtcaagggacccctatctgaggggggtcatccatgggggcgagaagggatttgactgtaatgtgctatgtacggtaaatggctttatgtactatgtactgttaagggtgggtaggtttgttggtatcctagtgggtgaggggtggctttggagttgcagttgatgtgtgatagttgaaggttgattgctgtacttgcttgtaagcatggggagggggttttgatgtggattgggtttttatgtactacaggtggtcaagtatttatggtaccgtacaatattcatggtggctggcagtaatgtacgaaatacatagcggttgttgatgggtgagtcaatacttgggtggtacccaaatctgcttccccatgaaagaacagagaatagtttaaattagaatcttagctttgggtgctaatggtggagttaaagactttttctctgatttgtccttggaaaaaggttttcatctccggtttacaagactggtgtattagtttatactacaaggacaggcccatttgagtattttgttttcaattagggagatagttggtattaggattaggattgttgtgaagtatagtacggatgctacttgtccaatgatggtaaaagggtagcttactggttgtcctccgattcaggttagaatgaggaggtctgcggctaggagtcaataaagtgattggcttagtgggcgaaatattatgctttgttgtttggatatatggaggatggggattattgctaggatgaggatggatagtaatagggcaaggacgcctcctagtttgttagggacggatcggagaattgtgtaggcgaata

SEQ ID NO: 483319 - DNA, 1000 bp, Homo Sapiens; identical to SEQ ID NO: 120108

SEQ ID NO: 483320 - DNA, 1000 bp, Homo Sapiens
caaattagatacagttagatgatggtagatgagattattgttatcagttaccattttaaatgctaagtattatggtaatcctttttagaaagaaatctttagaattagaattctagatggttcccaaatagctactagcattaatttttcattttcatctaataaagataggtagtaacgtcaaactatagtgtattttgctctctttccattttcatttcccaaataattgaaaattattttaagtaaatttgcaataataaacttgagatgacttaattatccaaactggaggtatctgtctttttcaaatttatttttaaatttgaatgactatcgtagatttgtcactccttcccattttgatagtatatcctaagccagatgtgtcgtgggttaaacatatttttaagttagtaatttcttcctttacaaagcataccaaagttaagtgacactgttacatgttaaaggagtaagtatggtataaattcagaggaaattttttcttatttataaaaatgtttttagaatttttgatagtctcacgagtaagtaaaattaacagcataccagaatgttcccaaaatgaaatgtgtggttcctatgtgaccagggaatataacatatttgttaattgtaggtatggtatcgggggatcttgatttgacactagccaacaataagacttgcagacctttccatgcagtgaggacacagaccacacgtgaagtactttacctgtactagcgccatggtacccacactttctggtttgaagtcccagctccactgcttattagttatgtgaccttgggaaaattatttaacctttctgtacctttgttttctcacctgtaaaatgggggtgattttttaaaagtacctagctcataaggtttctgtgaagatgcaatgagttattgtttacaaagcacctacaaaaatacctagcacatagtaagtgctatgtatgtattttcctttattattatattac

SEQ ID NO: 483321 - DNA, 1000 bp, Homo Sapiens; identical to SEQ ID NO: 309622

SEQ ID NO: 483322 - DNA, 1000 bp, Homo Sapiens
cctcgaggccacgaaggccttcaaactaccttgttttattggattttgagtaaaaacatgaaccatgtcaaagtttccaggcagactcctaaaaagcattagcagatctggacccaggcaggccagggacagggaggtccctctatcaggttttgaggcgggttgagcgccgaggtagtgggggctgggagggtcgagccgtcaccttgctgggtgttttgtcctgggtgttgggctgggagggtgggcggccgctggaagtgaacagggctgtcaaagcgttccgggcgttgattgcgcaccggcggctcacaggtcgggtggtggggctggggttcttggccgccttgtatttctgcaggttctcaaagtggcccagggacttgcagtgggagagctgtgcccctgagttgctgtgatagaacttgtggcagatgcggcagatatagcccatcacgggcaccaggaagtccacaccatatgcagtattggggctgtaggtctccgagcccttccactcctctctggatatatctctggacctcacctgcttgcagagttcctcctcaacctcgatctcttcttcatcctcatcatcctcttcctcttcttcatcaccctcgaagcaacccacagcgtccactgtaatgaagtggtcctcatcttggccagcaatttctttctcaagcgacttcagctccttggctttgtccttatgcccctgggacttcacgtgctccacaaacttgcgaggggttttgaagtagcggttgcaaacggtgcagaagggtcgcaaggattgtttggcaatcttgtggtcctgtgtcctgcggtgttggatcaggtcccccatgtagtagagctggcaggtgttgcaccagcgccttggtggaggctcctcatcctctgtctccaggacgtcccggggcacgggcagcagggacaggaggcaggcttggctcatgtgctggatctcccctagccgctgctggtgctgagg

SEQ ID NO: 483323 - DNA, 1000 bp, Homo Sapiens; identical to SEQ ID NO: 120109

SEQ ID NO: 483324 - DNA, 1000 bp, Homo Sapiens; identical to SEQ ID NO: 120110
  misc_feature (402)..(403): n is a, c, g, or t

SEQ ID NO: 483325 - DNA, 1000 bp, Homo Sapiens; identical to SEQ ID NO: 309626

SEQ ID NO: 483326 - DNA, 1000 bp, Homo Sapiens; identical to SEQ ID NO: 309628

SEQ ID NO: 483327 - DNA, 897 bp, Homo Sapiens
  misc_feature (531)..(531): n is a, c, g, or t
  misc_feature (540)..(540): n is a, c, g, or t
  misc_feature (760)..(760): n is a, c, g, or t
  misc_feature (834)..(834): n is a, c, g, or t
tcagaggagagcacagaagaacttcttctcccggaaggggttctccgaagtgggcacaggggtgatgaggggatcctcacaggcgtgggcatcacagtaagtcatcaggtctgctgctgccttggacacctgggacacagccagggaagggtattgttagccaggacctctgaaggggactgcagcctccctccccaaatgggttctcttttgccatctccagggctccttacgacttgtcttctccctcatcccccccagaggcctggggacagctctctctacagagccccagactcctcccctgacctcagggagtgaaggaaagaacgcatctcttatcttgagctttgggaacctgcagcacagcacagcctggccaactaatgggagccagccagggtcccacctacctttatccgacacaagctggcttcaatcttaagctgttccaccatcttgcgtgcttgcccaatactcatagtgctgttcaccggggtctcacctttcatcctgtaaaaaagagggacntctcacagnacagtctcagctggaggcccccctccatgctcactccacaccaacctttacaaggctgtggtcataccccaatattttgttcccctcctatcctcctcctcctcctccagtggaatgtctcatccctgtattcctcatggaaaaaaatagggtgggaagaagtgctccccaaactccctcatggcctgggccacagatcattaaaccttacacaaatganttaagggttttcaacccttcaaaccatgtgtgttcccagctctgaagaactcaaccaaccctgatgaagaaggnacatcacccctgtctgctccagtgagccccaacaggaaaaaaacaggccattacttacctgaa

SEQ ID NO: 483328 - DNA, 1000 bp, Homo Sapiens
cattaatgtgacaaaatagtatatgattctcttgaaaaattaataaaaacagactataatatacaattaagttatttatatttgaagagtgaaatcaattaaaatttaagtcttggcatgtagatttgattacttaaatgatataatgtttcctataaaatcagcacttttggcagaatgtgctttttgtctatcttataagttcagagaaatcattggcagcttccagatgcaaactgtcagaacatcactcttgttaacatatacttactggaggcccaggaggccctggaagaccactgtcacctttctggccagcgggtccctgttagaaagaagagagaggacataaataaagaagaggcaattaaataggtttcaatgcaaaattaaattgtcaaagggaaaagtacttacagtagagcctttgttaccctttgggccttgaggaccctacaaaatgcaaatgcaaaagcacagataaaaatctggagcatttgtgtctctgttatatttgtaacttaaccctaccttataaggttattttgtcttgtacttactggtaagcctggaggaccaggtggacctaagggaccagcaggaccaggaattccctagagagagaatcagccaatttaaagggattttctcagctatttcattttcatgttttcataacttttcaatattttcataacagcatacactgtaaaatttagagaatgcaaaaatatttatgaatggcttaaacatttttccatggtgaatctaaaaaataacttgtgcaaaataatcaggatttttcctatgttgctacaatatcaatgaggtttttgttttcaatctatatgtgttaatgtgtatattcctttatccctcagaatatgatttacaggtgatgggaatttagtacatgtttgtttaaataatactcaactgtaatttttatggtttctaacttaaatattttaaaatttatttactctagggctgaataaaa

SEQ ID NO: 483329 - DNA, 1000 bp, Homo Sapiens; identical to SEQ ID NO: 309632

SEQ ID NO: 483330 - DNA, 669 bp, Homo Sapiens
ttcaggttcttaggttccaggcagttcaaaaaacagccacgcggtttctttttttttccaccagaataccacaatagcagaaacttaagaatcggggatatgaaaagggaggcgtggtcctggcagtggcccctggccggcaggaatacacagcaacacccaggcaggggcagcggctgcccccatgccagcctgcccatccctgtaatgacagcagggcaggagatgcagctgtggccctgggggcaggtgggctctgaggctgcaaacaccctgagtgccagtggtcccagagggggtgaggcctctatctgtacctttattccagccagcctcctggcacagggctgggcccacatcctggcctctgcatctggatcagggctggtgctggtcagcctggtcactctggccagtgttcacactggaagtccatcacaggcgaagtcacctccttcccgtgttaaataacaagaatgccaacaccccacgcacgtgtcatctccagtgagcagacgtccaggcttcccgaagcttcctggctggaaaccgcgcagggccggcagcgccctctccaccaagggacacaccagcggcgcctcctccgcggcccgggcccccatcccgcggctcgcgcggccaggacgccccaggtcggagcctcgtgcc

SEQ ID NO: 483331 - DNA, 1000 bp, Homo Sapiens
ggggagcttcaggtgttcaaatcccactatcactgtatactgagtgtagttcaggtagccaaggtgagccacaataatctccgcacatttccctgcacatgtgagggtccttgtccggttgtgaactttgttatgaatgtacatcgtggttccatcttgagctacaccatcgactttaacagtcatgggaaagcttgtcttaatagaagtttcttttgattgatccaactcaacaacacatgtcagccatagttgctgattgtatgtagacagtggatttgaaagtatttgaattggctttagctttttgctattatttagtgaaaaattagccgcagaagtctggatcactttaggtcctctgatcccaacgaagatggtcaggccaaagcagatgaagaagacgacaaacacgaggacaaagtggcgcttggagagcgtgtagagccgcatgggcgccagccagagggacgtgcggcgctgtctgttttgctctctcttctgtgttctctgttgtcctcgcatgttctggtcttgggagccagaccagcgggaaggagaccgagcacctcacctcagggacaggcagccgcacgtccacccagggagatggacatagtatgctcagcctggccctgcaggaaggttactggcttcacggtccaaagctcacacgggcctgcgtgcccacatccccgcagcacacgcctgagagactgcagttgcagagcaggaagtcactgccaggcccgtcccagggccagggtgaggccgtgagtcaacacctctgcgacgtagctctgataaggccaggcccgctgcccccagcagggcctgcatggccacctgggcagtgagcacacagaccagggtcactgggtgaagaaataaagaataggtggctccacagctgccccgggactcagtgcaaacactcacccacaaacatgagacaagagagctggggaaggaggtggcctggccccaactcagctctggg

SEQ ID NO: 483332 - DNA, 1000 bp, Homo Sapiens
ttgagtctgggacggaatccccgtggccaagggccttcctcaggagcagggccatggagaaggcgcggagaggcctgcgggttctgtgggttttgtgggttttgtgggccagcctgagagaccgaccctgctcataatgccatctctgtggacaaactccagcctgtgcccagcagcccctgagaaccacgtctgctctgagctgggtactgcctgttcagagcaaatgccggttcccagacgctgccagctggccccgttcctctggattcctgccttctgcggcaagggagcccggacgctgcagtggaaggagcaggtggcactcgcttgcccgtgggcaggagctgtgcagaggaaacggcgctgggatccctggaggctggcacgatgctccgaggccgcatcctggggcggccggagtctctttggtggcagagcttggaatcccacgccagccacctgctgccactggcagcccccacaccgtgacccccagctttgtgcttgctggggctcctggcagggagggggtggtgcaggaaggagtcgctctggctgggacttggacacacctcagtagtaaggggattacaaattgggcagaaaagacaccttctttccctagaccagctaagccctgcttgcggtggagggcgggggagcgtgtcaccctgagtcacccgggctgctgtgagcgtgaccagggcagcgtctggggcagaagcgggccatccttttcagagccaggccccggagccaccctagggacacctcggaggcctgggtgctgctctcacggcccgtgcggtgggtggccagatgggagcccccgcactgtgagctcagcacctttcatgcccacagagtcaccaggagacccaggtgccccctcagggagcagaatggggaggctggatcctcactcaaaggtgaggcccggcgcagtgggagccttttcctcgtccccatcctccctgcagacgctgccggtcactcg

SEQ ID NO: 483333 - DNA, 627 bp, Homo Sapiens
tccacttggcctttgactgggctgggctcctcccagtggaacaacagggggtgtcgtgtttgcagcagaaacgcacactgggatcctttcttgcaacagctgggccggctgggtcctttctcttgtcttctgtacacaggcccctctccgctgtttctgcagagaccgaggtgggagggagaaagaccctccagccctctgctcccaccctccccgcagtctccggggccctgtgctgcaggcaagataatttggctaatgaactcgttaaagagcccctggtgacccgccccggcttcccctcggcccatctgggaaattccattgaaaggctggagaaggtccactccacttggcctttgactgggctggagaaggactgggaaattccattgaaaggctggagaaggggtccacttggcctttgactgggctgggaaattccattgaaaggctggagaaggtccactccacttggcctttgactgtgctgggaaattccattgaaaggctggagaaggtccacttggcctttgactgtgctgggaaattccattgaaaggttggagaagggcccacttggcctttgactgggctgggaaattccattgaaaggctggagaagga

SEQ ID NO: 483334 - DNA, 937 bp, Homo Sapiens; identical to SEQ ID NO: 309634

SEQ ID NO: 483335 - DNA, 701 bp, Homo Sapiens
tgcccagtcttgagtcaggagacatagccagggagcagccaccctgcctgcctgccacccttctaccaccagccacttcactgaaggaacgacatggactccattctgactctgcctgcacaggcgtccaggaaagctgcaagtcaaaacacccagcatccccgctggccccatggtctcccgctggccccatggtcccccaccctgagagggtgatccccccgccctgccctgcccagcacttaccgtagccggacttagctgagccccccctgctgtaaccctcagcaccgagagaaaaggagggaggatgggaagggcctgggctttgaccctcccggagagggagagaacatgctttgggaccctcaggtgggaagaggctccagagaccactgccgcgggtcaactcatttgccttctcctcctggaaatcgcagagcctgctgcaatgtataagtttcttctttatgtgttttatcaagatgttaaatgctgcgcacagaggcagcacaggagctgatggctcttggtccccagttctcagtacggggacctttgaccccagctcagccttccttcgcactcagacccaaaacccagttggagccctccctcctccactttcctgactgaggcccgtggcctctctgcagaaccttagtgtatccgcactgatcctggggctgatccattcgcca

SEQ ID NO: 483336 - DNA, 676 bp, Homo Sapiens
tcgtcagatgctagagcgaactgtgtcggtccgtggcaccgcgcacttccctccttgaccttgctcgggctcccgccttaccgaagtgactcggagtagcggacgctcagtccggccgggacttttatactgcgcttcccctcctcctacccgttccctcccttcctcctccccagcgccggcccagcccttccctcccagcgagccaagacctagtccacgcgttcgcacacagccgcgtcgcacatttccaagcctttcccgcgtcccggaccccagtgcctccgggatggagcctccgaattctcccttggtgaatgaaattaaataaataatcaactctttcttgacggcacgcctccctttccccctccccaatttcctaccttccttctccgcgtcctagaaagatttaagattcttaattcaactgctttcgagttctcgcaaggcatctcaaccaagtattaaccaaattaaggcaaacccttgcgcctttgcgaaggttcctccggtcaccgcggtactttgcagaatttaaatagcggtagttaaggtagggtctgctggttgggcttatttgtgcccgggagaggaagggcttgctgcctccttaaagatgaatcgaattcccgcgccgccatgcgccggagcatgcactcgcccatccccctcc

SEQ ID NO: 483337 - DNA, 1000 bp, Homo Sapiens; identical to SEQ ID NO: 309636

SEQ ID NO: 483338 - DNA, 1000 bp, Homo Sapiens
atcgatgggacctcccgggggcaagggcacagcgcaggctggcagcctccccagcgcagatctgagcacagggaccttggcgtgcctgctctgtcagccttcaaagagcagggctgataacgtggccttgctgtcaccggccttgtcagaacctgtcagctgccttgtccttggtggccagatggggctgggtcttggggctgagtggaaacgagacttgggagccacactggagccaggtcagggccaggcctagcccctgcctgatgggcacaggtctcttggtcccctggcatggtgaggagtgacacagcctgcctttcagggtggcagtaaggaccagagaccaggctggccaacccccagcaccatgctggtccccagcccggagactgccaatttggcctggtcatggcccaccgtgcaggctcgcccctccacgctccccgtgcccagcctcagtgctcagggcagggggcagataggaaaagcagggaggccccggggctgggggtctgtcccaaagtgatgtgggagggggatgagcaggaggatctgggggtgggcacgcgtggacagcagcctggggtctaatgtggcccttggcttcctgcctcagatgagctccctgaggaggggcagcttgggaggcatagggggctgcccccagcactgcgggggccacacgtgtgtcacatgtgtggatctctctggagccccgggaggccctttgcgtggctgtgcaaatgtgagacccacttatctcaggaactcccacccagacctggctcggtcccacagcctccatccccagccctgcatgttggatgtgcccaggccgagccccaggaacgcctggggcactatcagggccctcaccaaacagccccgtgcagcctggggtggattcccctgtaggggccttcccaggctcacctccttgctggaagcagcttccctcccaacctgaaatcccaggccccgtgtggcctcctcccag

SEQ ID NO: 483339 - DNA, 763 bp, Homo Sapiens
gtgctgtaatagaaaatagttggagacattagtatgaactcaggttagcttaatatagatatacagatggttacatttggaaatatttatagattttccatatacacaggttagtaaaaacacatatttcattgctttgtctgtcaaggggtcctagaagcagtgacaacccagtaacaatgagcacatctaatgcccagatcttggtttccaattctccagttaaaagaaccaaggcttcttggagggatagggcaggaatataccagcccagaggtcctttattttttttttaacacctattatgccatgaattcatagggaataggttccagcagctcaggctccttcccattggttctcacaaagtgtgcttctctgggtggagcagggtggcgctttagttgaacccaggtacctttctctttggcttctttctttttctgatcattttccttcacacgtttcaggaagctatctcggctcttagagtgcttaatgtgctcaatacgcacattaattctcttggcaagaatcttgcccttaacttgtttgtttacaacaatgccaacagcatgctgggtaacattgtagactcttccagttttgccatggtaacacttgtggggcattcctttttgaacagtacccattcccttgatgtctacaatatcacctttcttatagattcgcatatatgtggccaaaggaacaactccatgttttctaaaaggcctagagaacatatatcgggtgcctctcc

SEQ ID NO: 483340 - DNA, 1000 bp, Homo Sapiens; identical to SEQ ID NO: 309639

SEQ ID NO: 483341 - DNA, 1000 bp, Homo Sapiens
aggaatcaagtgtgattatccattaacttgtttaagattttgcatttactcagcctcttctgcatttaccagcagctgttctggccacggctgacataaaattgagtcccaccatgtaaacacatagttataatgggctagccaggtgatcaagttcccggggcacatacaggctgtggagaggcagctcagagaaagaacctaaacattatcagagcctatcgtgtagctcccgtcacacttaatacttggaagcctgtactttgccttcaaggccacacatgacccaaccctgctggtcttgctcactgcctactcctcccttgctctccaggctccagcccccaccccagccttctactgttacttgaacataccagctcctttctgtctcagggccaacacatttgctactcttttgccttgattatttctagtcacagttccttcctgtccataacctcagtgcagatgttacctcttcaaaaaagtaaaaaaacaacaacaacaacaacaaaaaaaaacctcccctgacccccgcatctaatatttccattgaatacctgctgccctcaccttctaatcatgaaaagtgccctttctgttttcttgtttgtttatttgcttgtttagtgtttctccctttcaattatcagctacaaggaagtttggttttattcaccattctatcctcagctccttaagtggaataaaaatttgcaaaatggcattgaggtcagctgcaccaagttttatcttgagctccaacactgatagcccatatgaccttcagcaagttatttcacttctcttagtccagtttcctcatctgtcaaatggaggtgaaaatgcttgccttgaagagtcattctgaggatgacaacagaatgttcttaaaattgctgccccatggttggaactcagaacacgctaggtgaatgttaagtagttatacaacagagggacagcgccagcagcctgtgccttctctgagtcctga

SEQ ID NO: 483342 - DNA, 1000 bp, Homo Sapiens; identical to SEQ ID NO: 309640

SEQ ID NO: 483343 - DNA, 1000 bp, Homo Sapiens; identical to SEQ ID NO: 309641

SEQ ID NO: 483344 - DNA, 1000 bp, Homo Sapiens
aattatttgaaacagcaacctaacccaacagcaagttgggctgttttctccaaaggaattcccaactgtcttctacaatgaaatgtctatgcaaatcagccccagaccctgtggggccatagtttctccaagcagcagtgatgtttagggattaatactgaaagctgtgctttgtctggatatcatcaagaacctgctgcagctcctcatcttcaaaccacccctccaagtttgggattagagccttggactcctcagcagtctctgggcaaaggttggccaaacagaccaactcaaatttatgaaggtttttctagagctacgaacactggcaatggtctctctgttttcgaaaccactgaaacggcctgtgtagtttcattgttttcatgaagacttctgagagttcctgttcatcctctgcactctcgttctattgctttcgatgttccagaagcatatgaacttctgaatttagaagggtctccgctgtttcaaactctttaggaaaaaggagctgtgaagtgtcctcctctacatcgtcagcccgtggatcgctgccgcctgctgccattgccgtgccgcgtgccaccacccacatccttgatttctttttattgctaagtagcattgaatacaccacaacttgtttatctattcactgcttgatggaaatttcggttctttccaatttggggatatgaaaaattttatttgaggatgtgaactttttatacaagtcattttccttcaatttgcttttaaatcactcaagagagaacaactttacaaaagtaaatgtcaaaaaaagcaggaggtatgtattgttacatatctctttatttctatagaagcatatagatcattccaagcatgattaatttgtgtctttttacacacaaaactccactggatggtccagaagagtatttcccatgtttacttagaaattagcactccctagggtctttggtaaaatattaattcttaggtcccacca

SEQ ID NO: 483345 - DNA, 1000 bp, Homo Sapiens
aaaaatataaatgtatttatctgcattatcacgtccctggggcacccagctggccggcccgtgggccacagggcaggaagggaacagggcgtaagtctcagcaaggcggaggagagctccgccaggtggggatgtggggcagcctcacagggccccgtgctgggcctggtatcgggacagcacggcgcggtagtgggacagctcctggcgcacggccacaacttcctgccgcagcagggcgttctccttctccaggaaggccgcccgcaccgatatctggttctccttgagccgccgggcgtcacgggaccgcttggctgcctcgttgttcttgtaccgccggctccagtatttctcatcctgcaggagaagagggggagagcactgaggtccagagggacccaggtcccagcgagagaggaagggagccccagcagcggggcctaaaccacaccaggtctctgctgggataggtacccaagggtctgcctttctagggccctggttgctaaggagattgggcccctagcaacagtaaaggcatgagatagaccccccaccctcaagcaactcgcttcaagtctccactctgcaaagcggaccccagccctccccacatgataaaggcctgcatgcagttagctcttgcttgctaaggatgcttgttccctagcaacaaggccttcatggtctgagggcttctcccaatgaagagcactgccctgccctgcacattgcctttccagatcctggttgctaaggaaagcttggtgccctggtgatggggtttggtgtcccataaaatcctcgcagagctggggccttctgacctggttgccaaggcaacctcatccatccttggcaaacaaaagtgaggtctaagtggtttcaatgactgtggccagcctctgacctgctggccttgaactgaggccagagaatagcctcctccccagtaggacctgactgagagaagagctgtctcttaggaaaggggact

SEQ ID NO: 483346 - DNA, 1000 bp, Homo Sapiens
acaaaccgtagtaaacattttatttacaaatttaaggcgtcctaagtgcctttgagccacgacctctggggcgagtcagagaaacagtttagtcaaacacctcacagtcgaaccagcctgcttccggagagaagtgttcggctggctagcaggacactgagactcccctctgctttgggcagtgtccgctgcagccagtcggagcagcgtggggcgaagcgtgaatgtcgggaggtaggctccacgctgcgtctcctgccctaccaagtcgccaacatacagtaagcacaaaacccagcccatggttgggaggctgcacgcaaggcccggatcccctccgccctagtacagtctataagcagccaagcgcgccttgggctggctcggggcttttgggagcgctgctggctgtgggctgtgttgcagggagaagctccgaggcgccgccgccgccaaggctgctggcgcaacccgcactggtgctgctgctactaagactgctggcgctgctgaagctgaaactattgccgccgccgccgctgctcccaccactcccagcactgctggcggtaatgagggcgccagtgaccggggccttaataactgttgtttggtgcagagaacgctcactcccctcagtccgctccgtgtcgctgggggccatgtccagggactcggagtcgctgctctcgctctcagcctcgccttcagaacggctggggctcctctcgtcctgttcgccatccgcagccagggctccacctgatggcttctcgccagcctccttgtccttgtccttttgggcctgggcctccttggagtgccgccacttcatccgccggttctggaaccacaccttcacctgcgccgcgccacaccgggagacaagaagagacaccgagatgagacccaggtttgctcctatccgactcgcgtgcaccctcaagccacctccctgagtgaaaaagcaacgcttacttggcgactctaccaaggacca

SEQ ID NO: 483347 - DNA, 1000 bp, Homo Sapiens
ctcaaggtatttcttttgtaaaggagccagatttggcaactagactgaaaatcttccaaaattctgtacaaatgtgtaatatacaaatatacacaaggcttttgccaagaaaagacatcacaacaaatgacagaggtggctttggtgtcacataccacctacagcatctcaaacccctaggaatgtgaggggctgatggaccacaacataggctacacatgtaaacacgctacattacactatgtacactggagtataaacaatccactgtcctctccggtctgttcacaagccctctggcgggaaggaaggccattcaccaggcaacccacataaggggaacttctttaaggtgggagggagaaccctgcagaatgaagtggttcaccctaagatctattaacagcacaaggcatgcccttaaagagacaggcggtaacagcgaattcgggagatggaccacttcttgtgctccttgtcatctctctctctctctctctctcactccatctcagtgaaccgggcaaacatggctttccggacagcatctttgtaggaatcggcgcccgacaaaccatatgcgctgcctttggctcctaggccagctccctttagccgaacttgagcctcaatgggagccgtaatgccttgacactttcgtcccaagccagagccttcccgccagcccatggcctgcagcatcttgttgccaatgttactgtggtcaatgccatctttggtgggttgctcgtaattcacagtgccggcatcaaactgcttcttgcgcttgggctctggaggttctggaatgccgtacttctcccgtctttctgcagctcggtctcggtatttcatctctctctcccttagctccaaggcttccagctcctgctcgctcagcctggatcgtcggtagatgtccatgttttgcttgtgaaggtctgagagttgctggtgcctgactagggcatctttgttcgggaactggcgccggcagagc

SEQ ID NO: 483348 - DNA, 1000 bp, Homo Sapiens; identical to SEQ ID NO: 309644

SEQ ID NO: 483349 - DNA, 1000 bp, Homo Sapiens
cagcagtgggttatataatattctgtaaatttaaaaaatatagaaagattaatttgaaatctgaagtcttacacctttagcgttaatattcaaattttggaaaaagtggaagaagttagtaatgatattgaaagatcacttgaacttccccaaacaatagttctctcatatttttcttttctctcaagacagttaacagtaagtattagtgaaacagtatttttacaaatgtttactgactagaaaaataagactgggttagaaaactctgaaaaatgctccatatggaagtatttgttgtttttatatttttcttgactagtgattgaagagatgaaaaatttgagactgtcagatttaatggggtatccaatatctgcaaagccaattatttgaaggtactaaatgccataaacacaagttgtgtttttcagcaagttttcaagctagctgttttccctgttgaagaattcattgtttagacttgtgacccttatactttcttggcttttgcattgttgcaattaaaaaaaaaaaaaaaaaggctgcccagtattgttacagtgggctcctacaaccacaagacaacctatatttgtaaaccagtgagctgaataacatggcacaggaagtgtactgagacttaatatctctctagtcttatacgtacgtacatactctttcagctacagcatacactcaaaaaatatttgattgatgaagtgagattaagagtatcctaaatgatctgaaagaaactcaaatataatgtcatgagatcctgaccatcacattgctttctaggcactagtcatgactgatatgcaaacttacataagaaaataaaaatagtggggcagtggccatactcctctataccacagggttctacaaagaggccattctaaggattcagaagtcactgatagaacttaaaattccaaataacattaaaaagtacaaacatttttgtcaaaatacaactccatcttttcatttt

SEQ ID NO: 483350 - DNA, 1000 bp, Homo Sapiens
gttttttgttttttgagacagtctcgctttgtcacccaggctggagtgcagtggcacaaccttggctcactgcaacctccgcctcctgggttcaagtgattctcgtgcctcccaggtagctgggattacaggtgtgcaccaccatgcccagctaatttttatatttttagtagagatggggttttgccatgttggccaaactggtttagaactcctggcctcaaatggtctgcccaccttggcatcccaaaatgctgggattacaggcataagccaccgcgcccagccaacacttaactgatttcttatttcctaatagaaaggattctgtttggtatcctataatactgatgcagcttgatttgctctgtacacccaggagtcttctgacaactcttgtgttcctgtggtggctaatgtcccacaaaatggaaacacatatggcaaggaaaattaaagtagaacctgtgatagtaagaaagttcatgaatgctgaaacaatgacaacaaaatttcatttaaagagacttaaataaaacaagatggaggaaggcccaagcttatggtgaagctgatactacttgcagtttaatatatctaaccattttatattaacagaacaaactggacttatctaattcctacattcataacttttttagatctccaaagcataaacatttcttccacaactcaagatttccaattctttttaataatctagtatgatgacccttttatattcaagtagatctctctgcaatgagaacacttgttcaacaagtacttgtgtcatgaatctgtgtgcttaaataaaagaagcatactgtgacttctgtgcttcagtctgagttctcagaaatacactggctaagacaatgttttgagaagataaaactttgaaagctaccattatacctattacactacaagttctacctctcatttaaccttacattcctgacgtagtttttagaagtcctatatagatgggttagtt

SEQ ID NO: 483351 - DNA, 1000 bp, Homo Sapiens
cgcgccccagctgcatgatcctgcaggagccggccaggccccctgcctctctctggtgtgacccccccaccccttgggtccccaggacaccccgggtgggtgtgtggctgcaggaaggcaggttttttaaggcacaaggaagccaagtcgtggtcggggcgcccacctgcaggccccacgcccgacacaggccccaccaaggcatggccccgagggtctggccccgggtgtggagggccgggaactcccgctgccacagtcaccaagagcctgagctgtccctgtcaccgcagggtgagcaaggtgaactagatttaatttttttaaaaacaggtaaactgatttctctttaaaaaaataaaatctctggtctgctaaggtcacttcagctgtttttaaagtggcttttctctggaatgatggaagttgtcgccagggggcccggccgtgggggcctgtgcccctagatggtggacttggagaaggagacccgcaggtggtggttctccccgaggtcgtggttgtgcaggtcaatgagggcctggaccgcctcctccacggagcccatctggatcagtgccatcttgcggtccttctggaagaacttgaatcctttgacgacgcccccattgctggaaaacaggaccttgagatcctcctcggagactgagggcgggatgttggagaggtgcagcgtggccgagggcgggaatatgttctggaagttcttggagcccggcttcttgaagcggtgcaggggtgagttgccgtagtccttggtcaggccctggtcctcctggccctcgcggggcagctgcacgttctggtgcttcgagagcgtgatgcggatgggcttcccgtgcagcttgtgcccgttcaggtggctcatggccagctgggcctggttgccgtccgccatctgcactagggcgttctccttcttattgaacaggatcttcacgcgctgcacgtcaccgtagacgccgaaaagaataaagag

SEQ ID NO: 483352 - DNA, 1000 bp, Homo Sapiens
attttcagttcaaaaataatttttaattgctataagaaacatcaaccactttcctaggacttttgacacataagacaaagtctacatatactaggtaaacacaagagcattattaaatgagtcaaaaatgtcaaaaaaaatcccatattctcttctggggaaactcagaaagatttcaagtatgagtgttaagaattagaaaagactatcataagctttaacattctaaataataagtaattgaattatttcagtttagttacacagcatcttttaaagtccatctttgcaaattatacgttgctataaatacattgtgtatttggcattatgtgaatttgtttaatccagtgtcaattgtctaatggtctaaagtgtcccattgaagttataatctggatgaactgaacaataagagaagttttcttcattagcccaattgtttatcactcaattcctactcctgcccatggtttcttccaccttcctctggagaacataaagagattctagatctctgtataaggtggtttgctttagcttgaaatcatcagtgaggattatacatgggcaatgtccagaaatcacattattgctcatagaccgtgtagtcttgatctaatggataactgtacattgtcttcactaagaagctagggtggttgtccttgatattgggacattgtagacttggccagaccaatgcccaaatatttcccaagacttttacctaagactctgctcagtatccatttgtctactgctggtcatctggaagaataaacttctcctgagtggtaccagcttatgagatttcctgagttgatacagaggtaaatgcatctttgttgcacaatttacagtcttttttttttttttaagaaaaaacatgattttgatcattgtaccacatgcctttataaacttttggtgttatgatgcaagatctaattattatcaaatgtagtgacgcttgttccaaattctaaaattgtttcaa

SEQ ID NO: 483353 - DNA, 1000 bp, Homo Sapiens
gagacggggtctcactctgacgccaggctggagtgcagtggctcaatctcagctcactgcaacttccgactccctggttcaagtgattctcctgcctcagcctcccaagtagctgagattacaagcacatgccaccacgcccagctaatttttctatttttttagtagagacggggtttcaccatgttggccaggatggtctcgatctcctgacctcatgatctgcctgcctcagctaacctcttgaggaattgccagaatgttttccaaagtggctacaccattttacactcccatgagagttctggtttttccacatctttgataacacttgtaactatctgtattttttattgtagccacattgtagtgggtgtgaagcagtatctcactgtggttttgatttgcatctctctgatggtgaatgcagttgagcatctttttcatgtgctcattggctatttgtctatctttggagacatgtctgttcagaacctttgcccattatttaatttgattatttgtttatgttttttgaattataagacctctttctatttctagctataagttcctcatcaaatatatgatttgcaaatattttgtcaccctccaaaggactcagcacatgcagagtaaaacccaaatcttttaccagggctgagagacttgacagatcctgtcctcatccctcaccactctctacacgtcactcccagctctctggccaccactgctctgcgtgtgggtccttaaacttgtcaggcttgatccagcctcagggcttctgcaaatgctcactccctttgcttagacattcttcccagaaatttttgagtggctcactccttcactttttaagactctgcccagataccaccttcttggagaggccttccctaaccattttatccacaacatttctccctaaatatccacaatatttcttttctccctattattctctactccttatccttttccagtagcacttaatatg

SEQ ID NO: 483354 - DNA, 1000 bp, Homo Sapiens; identical to SEQ ID NO: 309649

SEQ ID NO: 483355 - DNA, 1000 bp, Homo Sapiens
aaatgaaaaggaaacgtttattttggtggggagtgagggtgggtgggaagggggcatgacactttttctttggggagaggggggtgacatgcggcagcttctgcattgggcggttcatgcacccagggtgggcgtgggggaggcttggggaaggggccacgccgacccctccctccctgccctgcgggtgggctgagaagacccgccattagcaccagagttggacgatttgcagacctcccctccccacactgtctccgaaccccgcccccatccctgagagcgccccctcaccactccccccaccagcgacaggctaggcccgccccgcccacatttgagtgagagaaacttattgctctgtgtgtgtgtgtgtgtgtgtgttggggagggtgagccgcggagctcaggaagaccccccgccattcattcctccccaatcgccccgccccctggcccgtgtccgtgcgttcccggagcgcaggaggggtgcgacatgcgtgtggggggcgcgtcatgcagcgcatgcgtgtaggtgcaggcaccctggcggccggggggaaaagggggagccggacttggaaagagtccctttagctcgctctctccctccccgaatcccacactattgacttgggggatggggtgggaggggaggagaatcacgttttgtagaagtttatcatgattgtggttattttgaaaagctgaactcaaaagctgggtacgtgtggcggactggcgagcagggggagacgttgggaagaggtcagtaccctttggaaaagaccctcaccccctttccccgcctccttcggctttcgtgaaggtcaggggaaacgggggggcttgttaaagaagttgaaccctttggcaatataatcagtccccaccccgtaccctggtgtctggagcccctagccctttgccccgcccccaccaaaacccgccccacccctcacccctgcttcaccagggtttagggtccgagggaaggatg

SEQ ID NO: 483356 - DNA, 1000 bp, Homo Sapiens; identical to SEQ ID NO: 120112

SEQ ID NO: 483357 - DNA, 1000 bp, Homo Sapiens; identical to SEQ ID NO: 309652

SEQ ID NO: 483358 - DNA, 1000 bp, Homo Sapiens
aaacttggctaagttgccctttattaacgaaaacatagagctttcggtcaattccaccacggagaacacaaaccagagataaaacccacaccaagggctatttcccaagctggggaatttgagaacacacgggcagagttcacgccacacaactacactgggctcgtccttgggaggcgttcacaggaagcaatcacgagcgccaagccacccacaaggcagtgcggcaaggctcccgggatccttacaggcatccaagcgaggtacagaaacctccacagcagtggggataaggggaaaatattttctcttgctaaagaatatccttagttctcaacataaacatgactacgtatatattcagcttcaaatgaaaaacaagtttacaaatcactactggatacttaaactctatgttgcttttctttttggcagcaccagcctaaactctgtgggtttgcaatatttcagaaacttcaggtacattacagtcttctgagaaaggcccagaacttcagaattcccggagcggctgtgaagaaagaacattactggcaacaaatattaaaacaacatttcaagaactccaagaatacactgagaggtttgtaaaggtgcacatatttaagcattcaagctatatcctaaatcatttttctgttaacgtatttatttttggcttaggaaaaacatgtactttattggcaaattgttttagctgtagacggatggatgattctacagccacactcccctttccgggtgtacatccggggcctgtgcacctgcgcggaatcaggcaactttgtttttcccggtccccaaaaagctcacctttgacacaccctctatatgcataggaaaactgctcttcttattcagggtctctttttgtggtggaattcagagaaactgggttgcaacatctttttagggagaggtcgagtatgttttttcattcgagtgactctgcatgcttaaggaatctgagtcggtataa

SEQ ID NO: 483359 - DNA, 1000 bp, Homo Sapiens
cacagggagacaggggcagagtgggccacaggagcccagggtccggggcggggtgatggggcgggagacacacgcagggcagggcaggtggagtcggacgcgggactggggtgctctcccccttaccgtgtctttggaggacctacgcctcttgaagctggaagccagggtggaggtgatagccctaaatgtggctttctttttagggtcaggctctgctctaccactctttctatcctaaaatgaatatgtataagtgattagatggctagggtggtggccacacctgccctcgcctgctcctgcatgggccgctgcccagcctggccggccacttgggccctcgctcctgcctgcctccctgtgctggacagacgggccgacagcggacgttcgagggtggcctcttctcctgcccggggtctcgggcctgaccttgctcgtgctggggctgggcttgggggctctcggctggctcttcctgggaggtccgcctggctccctggctcctgggtggccctggcttacaggcgtcccgaggaggaggagtcctctgaggactggaggagttgcccctcaggccacaccagctgtctgcgtggaggccactgacccccaaggggcacacaccaagattcaggaaggggccgagggctggaggcaggtgtcgaggtggaattggagtgacagaggcagctcccgggactctggcctcaggtctgatggccaggtggcctgtgcccgccagtgctggcagcggccaggtccccaggggacctgtgggggccaagagcaagagcgggcggatgagaggtgtggagcctccagcaacccccatcccccagcagccctggccgcactgtcggcttcatctcaggacacaggctccaggacggcacccagagaaagagaagagacggagtgaaccggaactcgaccgcgggccacgagcccttaggcctgtacaggcccactgcccaccctgtcccaggtgggccgt

SEQ ID NO: 483360 - DNA, 1000 bp, Homo Sapiens; identical to SEQ ID NO: 309654

SEQ ID NO: 483361 - DNA, 1000 bp, Homo Sapiens
aagcaagtgacttttaaaaacaaaactgacattcagagggaaaggaatcattggctgagctggggtggcctaaaacagcaacaatgaggaagccgcaggagggattattagtacgaatgaactcgaataagctcagcgtagggtgggggaggggagttggggccttgacttagtcactaaaaaggggcttggggagagatggaatctgcgccctgttctatccccagagctctccctggaatcttaattcccctttcctaaaactcactccccctcaaaaaatgtaaaaattggttattttttagtgggtagaagggagctccaatgtggctttttaaaatctactttttttttttttttttaatccatagaaaatgcagtagtttggagggaggtgtacccttagaagtggttaatagaaccttgtataaacacctttcaccagcccttcctttagggcagcattcccatcctatcctctctcccagacattataaacatcttttaaacagaagtccttgaataatctgatataaaaatgcatgcctctgttaggcatggtgagggctttggaggggcggaaggagctttccttacgtagtgatgaactctccaggctggggagggtcccagtggtgggggaagggctgttcctggaaccgtgatgtccacagggggtgagggggagagatgtctggctggctcctcactgtggaggtggcacaggggtgaccgtgcctgggctcggggctgtggggtctggaggcaggggggtgcctgggtctggcagtgggctggcactgggcaggaggttgccctgaacagctgccacaatggcagggctttgggccgccacgcctgggtgcccgctgcctggcactgcccctggcatcattgagggaggagtttgttggttggggaacggtgaggggccatggggtccaggggggggaacccctggtgggactgccccaggctggggggctccagctggttgctg

SEQ ID NO: 483362 - DNA, 1000 bp, Homo Sapiens
cagtatcaaatctagttttaatcttctataacaagtcaccttttcttcccacctatatccaactgcgcctagtggtacagtgagaatgatggcctcctctctttccctggagtctgaggtattggcaacagcagtcacccactgctgagaggacttaggacccagcagaagtcaagggtcattagtgccctgcagctgcagggatagcctcacttcaggtggggatggggtaggatgcgggcaggacagggcctaggaaaagaagaagggtacaggagccttcctgactgcagaagtttcctgtttgtctgaaggcaggaaataggagctaacggagtctaaggccaaaggttatcttttaaatagagcataggatcagggagctgggacctcactagccactgataacttccagcgccacccgggtgacagaaaaggcgcagaaatggaaagtgaaaggttcagggctagccaggcaggcccctccttttctccccgcagagcgtgcagggggaaggccaccgtgggatggtgctccggaacctggactctcttcactcagccttcttggacactcggcccatcttggtgcggatgtttcgtaggaggaagaaggcagccgtgctggccgcacaaatcacttcagccacccagaaggctgtgctccaactgtagtgcttggcaatggtgctgaagggcagcccagccagaaagccgcccacattggccatgagtcccacaatggcgtgggaggtgccacacaagttgggaggggcactctcgttggctatgactccaaacagggcaatggggccatacgaggagaaaccaaatacagctcccaataccaggatccagagctgccaagggcagagtggagtggcattcagagtcggaaagccgacctgcctacccacccctgccaaagcaagaaggcggcttggtccccagaaacaaacagtagtcataaaaggacagtaagtaagtgattcttttcctt

SEQ ID NO: 483363 - DNA, 1000 bp, Homo Sapiens; identical to SEQ ID NO: 309655

SEQ ID NO: 483364 - DNA, 1000 bp, Homo Sapiens; identical to SEQ ID NO: 309657

SEQ ID NO: 483365 - DNA, 1000 bp, Homo Sapiens
attttgcataacaagtttatttttttaaaaggcatatagacaataaacaaagtaaataatcagatcttaacttctgtcctagacttgttccgttaagttctagtctgtgagcacttgtagttcaataatcgtcatcttcatcagagtccattacttttcttctgttgaactgggaggaaaattaaatgagtgtcagaacatttctaataaagcataactcagattttccgagaaaagatttctaccaattttagcaagacatttgtgtctttaaagcaacttagcgtgaactaaaagggtgggaatggagtcaagagcctataaaaattagaaccctcccccaacagattcagcctttctccccaaactttcacgtgtttgacaaaaggaaaatgtctctgggctgaaaaatatgtgtggtagatgtatactcaacattaatctttaaagtatccatcttttcatttgccacaagcatctggggacacttactttcactgttgttgtcttttctgtttgttggcttacttttttaaggatttctattaaaccttgttctgatacctaggagaaccagaaaagataagaaaaacagtacttttttaaacaaagaatttacctctgcagatggaatcactttgtactctttttgaggtgtggggaaagagctcaggaaggaagcagtggtgaggcaggaggttgaaactattggttataactattggtttaagttccaaataaaatttgctctgctattcctcacttgagaaggagggggaagtatccataaaattgcttcctcaggaaaactgaaagctaacatatttaagaacacctttatcatcactagctgagtgtgacaaccacatataccacggtgtttggtgtcaggaatagacacaccacttctgcccgagaagcttaaacatccccttgaaggaggtaagtcacactcggaaaagatcaacccaaccagctctctcccacacaagcagttctc

SEQ ID NO: 483366 - DNA, 1000 bp, Homo Sapiens; identical to SEQ ID NO: 120113

SEQ ID NO: 483367 - DNA, 1000 bp, Homo Sapiens; identical to SEQ ID NO: 309660

SEQ ID NO: 483368 - DNA, 1000 bp, Homo Sapiens
agtgtcatttcataccagcaattttatttacacaataagaacatacaggtatcgtcagagatcatctctacatttcagatcttgactcagtttaagggccaacaaaggaaggcttttctctttccgttgtttcttgcctctgttttttgttgtacaaagtgtgtagtactagcaagtgcattaccatagcatgtctttaattttcaatttgaaatctgatgtgctggagaaaagtgcatcgtaagtttttgtttttgttttttttccccttacaaattcaaaggactagaataatgatagtcatctggaaaaagtaaatcatgaatggctataattttgaaactgatgcttaatgatggcagtgatttttaagtgtggtaacaaacgttttgggagcatgtatcctctgtcaagatggtactagtaacagattcaaagtagtaccatatcgtatcagactgatgtgggggtttttatgtttgacatcagttggtgagcctgttgttccttagtaaattgatgccataagctaaagttaacatattcatattttccctgccaatagtccttcataaatacctggtcataaactgaaaaaaaagtaatatctgcaatataaatgtgttgtctattagagacggggctagatgtcttaaggatttctaagtacatcttaaaatttataatatagtcgttcataccaagaatcatctggggaattttaacaaaatatgtatatgttctaaacctcatcactaccccataaatgcagcttaggtctgtaagtctgaaggagtatgtgtatctatctgggtgttgttttattttttttttttgagacggagtttcgctcttgttgccaaggctggagtgcaatggcacgatcccagctcaccacaacctccacctcccagggtcaagcaattctcctgcctcaccctcccgagtagctgggattacaggcatgcgccaccacgcccggccaattttgtatttttag

SEQ ID NO: 483369 - DNA, 1000 bp, Homo Sapiens; identical to SEQ ID NO: 309661

SEQ ID NO: 483370 - DNA, 1000 bp, Homo Sapiens
accaaagagcaaaatttaatgaaagccagaactgttaagtatggattcctgttgagaaaaatgtcagtctctttcagagttttcccaatgctctatttttaagaaaagtgtagtaaaaatacataatacaagttaacttttttcttgcttgtgttttcctttcatttctccattgatgaaaaagcacatttcgccagagtcttggaccccctcatagcatagaccctcatttctagcacaaacaagtctctttttatccgctcatgttacttgtgggctcagtagctggagaggcatcttactaggccaaaggcaaaaagtctttgaagcatgttgatgttaaagggttatttccaactcttccaagatgcagactccctaatggtgggtcacatcggattctgcagtggtaggctgaaggctgagaaaaatcttgtatgagggcaggggctgagagacatcagctggcagtagttaaaagcaatcatccatcttgagggtccggtttcatgaaccatgaccacattgacacgcgagagactgaacaacaacacttgagtcaaaaaagtgaagagtttgattttggaaggattctttgctatggctgaaggcaggagagtggagagacatagagatggtgtgggtccactgagagaatccacagaaaagccaataaagctgcacctacccctaggtgggctccaaaacctttagcatgtcaattgctaatgataacccctagcagagaaaattggatagaagtagggggtaagggaacaagccagaatatggttatcagtaaaagctaatgacacatggcacgcactgaatcatgcacctaggagagtgactgctggagagctggaagccagttgcaccaagaatgagagttgggatctccaagaaagctatatgtcagggattctcacttccaacaaaagctgaactcagcctgggcttctctctataaaccctgccacttcaccaatcttgctttagt

SEQ ID NO: 483371 - DNA, 1000 bp, Homo Sapiens
ccacaacaaggaaaatgatttaattctacaaatttacaaaccaaaatacaaaaacaaaacatggagcacaaagtaagacgaggagttccgagtctcatcgcagctccagccgcagtagccacgcctgtggtcccggctgagttctccccatgacggggtccactctgaccttcagaacttgaggctgaagccggggcccgcggcagaggccccctggttcgtggtggtaaggtggaagcccgtctccttcaggtcgtcgtcacccagctggctgtagcccaggcctccctcagggggcctcgggctggtgccccgcttcacacgctgctgctcgctcttggcgggccacgtggggaacatggaggggtcgatggggaggggggtctcgcggaaatactcatgcttgaggccgtcctcagcgctgatcctcctcccggggaagtaggtcaggaacttgttcatgaggtcgaagccctggtctgagagcagagccccgaagcgcttgcggaggttgttgtaggggtgctcgctgaaggtcatcttcttgactactgggagctcactgtagccgggccagattttctcactgggggtccccagctccttgaacactttgttgatctgatcgatttccgaattcccggggaacagaggcttctgagtcagcagctccccgaagatgcagcccactgaccacatgtccacggccgtggagtattcctaagacgccaggagaggtgttcaggaaggccagtgcccgcgaagctgtgggaggcttgaggatgccggcgtggctcagcagcaggttggacgtcttgaggtcacggtgcaggatccagttgtcgtgcaggtgtttcaccccacgcagcagctggatcatcagggtcttcacctcccctggcaggaagggctgtttcatggtctccatcaggctcttgaggtcgtgctccacatagttcatcacgatgtagatcttgtccatgttgctgcccaccacaat

SEQ ID NO: 483372 - DNA, 1000 bp, Homo Sapiens
ctttcatcatagtgctttattgacagtaggggatttgacttgcatcctggagaagcagattaaactccaaaggtttggtagatccagcgttacatagtgcaaagtacagtaagagaggcagaaggggactaaattaagaactttaacataaaggtttatcatgtttaaaattaggttagtgcccacatcataaggactcaccctaggtgaatgaaattacgtgaaactcacagagaagaaatatatattatggtaaatggggtcttactgaacaaaggtccagggatgaaaataaatcaagagaaatttatcgtgaacagtggtcagcttcttagaagaacatatagattcgtcacaattgcctttggtatttcctgtttccctacacttcttaccaaatgtgctaatacagatggttgtgggctcagcactgattagaaacaagaggtgggaagtcatgaccagagccatcttcaccaacatatattcacagtgactctttaaatattcaaaaaaggaagaaaaataacatcagtctatgcctgctcaggagtgttaggcactttacttttgtagcttaatctttaaacaacgtggtgaagtaggtgtatatccctagtttacaaatgaaaactgagatcaacagaatatgctctccctctgtccatgggaatttaattaaaatactcaaatttacagagtaagagatgtgtacaaagcacatatattgaccctgttgttaaaaatatatatatattaaatgtccccgaagtatattttattagttgtttgcatttcctatttctgagtttcccacttggtgtgtgtttattaagtgagctagcagaagtgacttgatgtaagcaagtgaaattggtgtccatttttctcatttaccataactgcagaaagtctttaatttgggaccacttacagtggattcagtccccatacatggtttattttaagtgagttgaaaatgttatcctggactctgtgg

SEQ ID NO: 483373 - DNA, 1000 bp, Homo Sapiens
gatcctaagacatgctacaaaaataggtctttattcttaggaaaatatagtcagagctagcttccttatgctatacataaaatcttaacatcagaggcagtacagatagtacagatagtttttgaactgatctccaaacaagcacaaacccactacgttgaaaagaacaggtaatttgaggtttttggcaaaagacagtacttcacacatctaatccaaatcaaagggcctgcagacagttttcagtgagatgaaaggaatgaaataaatataaattctacggataaataaaacacaatttaaataagctaacagaactaatttttttaaataaaaatactagtcaggtacaagcttttgtttctcaatgccagacttctaaatatttaccagactactgttaatattaaaaacctaatctttgacccagagcgttagtaataatactggtttgcatctgcaaattttcaaactgaatgcttctggtcctgaaaaatattttaggtgtattactgaaggcagactgtggtgctaatagaatttaagtcttaaatacttttaaaaagtgacagaccccaaaagtccatctactaatttgctagttaaaaaatgcctgtgagcactgcttcataattagcatcttaagaaaagtagtggcatgccctattgagtggtatcatcactgagtaattaatacaccttaaaacaatatccccacaagtctgtttcttttatgtatttgtcacttaatttctttagtcattaattttacacccaccagtgaattcctatggccagatgaaaattttgtggtatacataattagagagaaaatgatcatggtgggtattcctgtaagtttgacgaacttgagaagttttagcaccctcccctaaatgcatgaagcccttctatttaatttctctccttaaaatagagactacgtaaaatactctgtaataataagggatcttttgctgtttctgacaacttttggctt

SEQ ID NO: 483374 - DNA, 1000 bp, Homo Sapiens
gagacagaatatcactctgttgcccaggctggagtgcactggcacaatctcggctcactgcaacctccacttccccaggctcaagcaattctcgtacctcggccccccgagtagctgggattacaggtgcccaccactaaacccggctaatttttgtatttttagtagagacggggtttcagcatgttgaccaagctggtcttgaactcctgacctcagatgaactccgcccgcctcggccccccaaagtgctgggattacaggcatgtgccaccacgcccagccgagctctgtgctcttctgaaccctgctccagtcctccttccccacctgagctgacaatcagaccaaacgcctcccttaggactgctggagagtttcttgaatcctgccccaaggactaggagtctggacagagcctacaggaactgaccaaagccttctcccctcctgtccctctcaaagagaagattccagaaagcccttccccttgacaacccagacccctcgacagcctaggcactgggtccaggaggcaccagctgtccatcttgccaccacttccagtctttccaccccatccccacctcatccatccccaccctcacccctgatctgatctaggtctgctgatctaaatcagggtgcccatacaattttccatcccgcctgggcacttccaagaaccgaaggggatgctctcaataattacaccagaacacgggagacaggatgcacggtcaccccacccatgagggctcagcctccacacccaggcatcttttcacttctcacacctctattgtgattactgcctgatgcaggcatttgctgagcagcctcgggcaagtcacttggtctctctgactctccatatcctcgtctagagtgcaggaatcttaagagttcctagagttgctgtgagagtgaaatgtctttcacattttaaagatgatgtctttaaagtgtctgaacacagtggatacatagtaaacagcaa

SEQ ID NO: 483375 - DNA, 1000 bp, Homo Sapiens
caaaacaagtgttatttattataaaatcagtggcttctgattagaagactttttttttttaaaccaaataggctcaagaagctggctggaggtcgaattggctgacgaacatcttcttcctccaccagcagtttgtgggacacatcacgtttctgccaagtgctacagctgaagcccatattcatagaagcaccctgacagcccttctccagcaacttccagaaaacagaacctgagcactcaaagctgcatcagcccatgtggccttgctcccagagaagcatctgccagtttgggcatggaggaacagaaagtgggcagggaattctccttggctccttagaaggcagtgggagcccagggaagcgttcggccccagtgcagcctaattgggagggagggatgggtagaggctggctgggcttctccttcctcaccctcatgcaaggtggctgcccctctggctccttcagagctcttcccttccaagttcctactgagaaataagaaggcacaaaggaaaatcagccacctcctggaggtcactgtgggccacctgctttgctaagagccaagcacagacccctgcattctccctgcaggagagcccacccggctcagaagaaagcaattccgcctgtggggaggagaggaagggaggggaggggaggacacatggtgaggtggaagcagcgagcagagcttctccatccctcctctccttccctgccagaaatgcaattaagcaagtggcccagactcagccgcacagacagcgcttcctgctgggggaagtcaaaagggctgtagcagtgggaaagggaggtcatcgggccccagatctaattaaccaacctgccttgcttttgacgttgctgcatttcctctattaacattaatgatggttggtctgaatgtccaagcatggccagaagcttccctccccaccacccagtaggtagcacagcctgtccctgggaccaatatccagtctccgtgg

SEQ ID NO: 483376 - DNA, 1000 bp, Homo Sapiens
gcggccgccaagagtgaaaatagagggaagcgccatgcaagtgctggaaagaagggggcaggtgggacgagccccacagccccctccccagaaacgaccacctccgggactcagcgctccctcgggggcaggctccgccagccctcggccacacgtggcgtggctccggcacccagagtccgattgcctgggatagaaacggccggttctggcggccaggtccgatgctctggaatccagccccatttccctcccggccacgcccgtccggcagcctctccagccgcattcagcccctactcacctggggaccccgggcggggcgcggttggggcgcgagggcacctgagggggagggccgaaagggtcaggggaagcccccggcctggagggcacggggggcgccccccccagggcggacccagcaggcggaggcccaggagcagggccccgcgacccgggccgggctgggggcacggcgggggctcggcgctgcggcgtggggctggacgtgggcgacctgcgtccggccggtacgctctgcacctgcagccaggagtcgtccacgggcgggggcatgggcgtgctgacggtggtcgtgttgatgtcgccgatgatgctgagcgcctccttcagtgcgtggtacatgcgcagcatctcgtcgcgccgctgtgcctgctccgccgactcctccatcagcgtgttctggtccccacacgagtacaggttggccagcagctccgagaagatgaactccttggtattgttaatcatgaggtgcatgatggtcttgggcatgaggtccctcacggtcttgttgacaatggccatgtatgagtccacaagattccggatggtctccacttgccgttccagctgtgggtccatggaatgcatgaagctgtcggagccattctcctcggtctcgctggcctgccatggagaacacaagggcatcaggtggccaggccatgcagccaggctccaggcatccccagga

SEQ ID NO: 483377 - DNA, 1000 bp, Homo Sapiens
gcagctcgggctccgcggggtcgatgttgaagaaattgacggcggcagcggccctggtgggcagcggggggtcctgggtggcctcgccaggaagcagcagctgggccgtgagccgcaggcccgaggagccgcctgagcctgcgtctgagtccgaatctgagtccggcggcaggggcagcggcagcacctgctgtaggctaaggccgggccgggggccgctgtgagaggtgcgcagtgatggcgaggccaggctggcctggcgctcccggggacagcgtggacatggcaggaacctgcccagcgcccgcttgaagtcccgcatgaagagtgggtagatgatggggttcatggtgctgttacagtaacccagccatgtgaggacatcgaagaggcctggggagatgcagtcgcacacggcctggggggaggggatgcatcatgcctggtcccagggcagggacccaggccacccttcccagcatgtatggagcagacacacacacacacgcaccacgagaggcagcctaccctcccctgtccccatgcctgggctgggatccagggcctctcctgcaagggccggactcacctgccccctgccgtggcattacctggactatgttggccacaaagaagggcaaccaggtcacaaagaacatgcccagcaggatgcccagcgtcaggctggccttcagggccttcctgctgtgcttcgtggctagacgcctgctgtcagcagactccacccctgggcgtggggtcctgggcacctgcggaaaggaaggccacatgagtccgttgagaaagggcccccgtctgaccctgatcctagccacagactgagcttcaatcctaattctagactgagccctagtgccaggattaaactgggccctgttccttgactgagtcccaactagagtcctagactgagccctgaccctgactccaggccaagccctgacatcagcaataaaccaagccctgaccttggcccccc

SEQ ID NO: 483378 - DNA, 1000 bp, Homo Sapiens; identical to SEQ ID NO: 120114

SEQ ID NO: 483379 - DNA, 1000 bp, Homo Sapiens
aaacgccatcctgacctttttattgtcgaaattaaaaaataaaagatacttaaatacaacggtgaacatatagggcaaaacagaatcataaaatttaatgttgagttaagcagtgagctgaatgtctaggtctccaaattggctttgaacccaaaaccacttaaaaacaagtatgttcacagttaacggcaattggcttataggtgagagaatggtcgaagttgttccagttgaacttccagggaaattctctcctcaagaacatcctttaattgttgctgcaattcgctattcaatctggccaaaacggtgttggtttccttattacgtctaattgatgcctgaatagctttcttatctttcccaacagatctgggaatagaaggttgtgatgcaagaacagcagctaagacacccgtcttttgtgtatgttcatcaatttctggccttaattcatcttctgattttaatcttcttcgaacaggtttaggtggtggagcaagtggtgttgtgcctttgctcacattggcaggagcactagcagctgtcttttcttcagttttactatctgttttggcaactcgaagagaacttgcaggatcagaagctttttcagccggcaggacttctggatgtttctcggcttcatcatcttgttcgtcgtttacatttgatgcagcaaatacttcaaactgactgaaatctgcaaaatttggttgctctggtatctgctgaggtgaggtactagtgtgagttatgaggccatcggcatccactgggcgatgcacagcaggaccaggagcctgtgagggctgtggtcttggaggcactgcaggaggatgggcaacaactccagcctgttgttgtcctgtggtgactgtaaaggtccgattcatatctaaagatgatgatctagaatgagagggctgtggccttggagggggaggtggtggtgcagtgttatcaggcgacgttcctgaatgagacctttgacgagtta

SEQ ID NO: 483380 - DNA, 1000 bp, Homo Sapiens
aattagccatggtggtgcatgcctgcagtcccagctgcctgggaggctgaggtggaaggatcgctttggcccaagaggtggagcctacagtaagccaaggtcgcaccactgcactgcagcctgagcgacatagcaagaccccgtctctgaaaataatgataataatagttggcataaatattaaggagcagccatggatacacacagaagtagatgaaagcagccagaagaggaaaccccgtcacaagaaaggggagcccaggagagggcagaggagacaccatgcctggtaatagaagctgggggagaagaggcggatactttgtgccaattagggaccacctgtttgctcttctgtaaagtgggacttgaactagacctccacatttttaggcactagagcaagagggagttatggtattcgtggcagagcccccaaagaaggggaaagctgacatctgacttcactaagtttaatttgcagagaagtgttaaattgaattaaactgacacttataaaaccaaatatgaaactgcagccataagcacgtggtcaggggagaaaactaaactgtcaaaataagcaggtggctgcttccaagtgttcccattgattcttgccagctccttgttcatttgtctgtctgctggcatccttttgccaacaagtggtcataggcagaaattccaaaaaagtttgttggaaaaaaatggaaaatcaaaaagacagtagccattaatcattaattggggctttttatatctaaattgggaaaaacccatctgagtccacctttggaggcaccacgcacgttaaaggagcctggcctgagactgactggacgaaaggctgcttaggggcctttcccagccaaatcctaagaccgttttccagccccagctgctgtgggagtcaccgtgcagctggtcctggcagcatcctggggacctgaagcaggggcaggggcaattgtcccgatctgttgtcccagcatcagct

SEQ ID NO: 483381 - DNA, 1000 bp, Homo Sapiens; identical to SEQ ID NO: 309665

SEQ ID NO: 483382 - DNA, 1000 bp, Homo Sapiens
cagcgcctcacatttgtatgagtctgtgatgtatcaagtgctccaactactcaaggtagcgcagaagggaaaacaggcacaggccggggggttttgggtgattacacaaatgggcttggcctccttaccccactgcaaactgctgaggcgcaagggagctcccagccctcagcctggaccctgggacagtgccacctgagcccgaggctctgaagcactgcgtgatgacagttcccacctgcaactcagcagccagggaatgaatgagagttaggggtggcaggggccccggccatcagtggggcctgcgctgccgcctccgctgcactgcctggcgcagagcctccagcagctgctcctggttgttgcagacattgtaatgtgtcaggtgcagcagcttgtccacgtcctcctggctgtaggtcaccttcgtgtagtggtagggagagtccgatgaagacaggttcacctccccagctgccgcctcctcgggtgtccgccggaccccaggggccgagtactcccggaaggagtcgctgaccagaggaaagtgcagcaccgcaggggctccggggcaggtggggtcggagaaggtgtggcactcccgaggctggagctgctcttcggggctgggcgagatgggtgggaacgggatcccctgctcctggcagaaccggcccaggagctgcaactgctggaaggctccgtggaggttgtagtccaatgacaggatgaggtccacgtcccgagtgggctgcaggaggggcaggcagctggtattgatgaggtagccaacatccagcaggcacaggtggggctccgagggtgtcagctggttggggagcccatccagagtggtagctttccatgtggagaagtgaggatgctgaaagtagtctttgtggaaatggaggccacgcaggaaattatgtgtggcctgggccagtggacgccacgtcagaagatcggtgaaaaactcagctattctgccggctgttga

SEQ ID NO: 483383 - DNA, 1000 bp, Homo Sapiens
gcaatttgggaataggcaattaattgaagaaatctgagccatcaagacctagccctcagtttcctcacatgtgaaatgaccaagttgtgctatgtgaactctaaagacctttatacctccaagattccattttaatttaatctttcctcaagcttaagaagactttctttttgtcttacataaatcttcctaaagggttatataagagactgtatatcaatattaatgactcaaatgcacagggcatcttgattatcatcatcctttgcatgaatatgaaacatgaatgtgcccaatatttcacagtaaattcccgcacatggaggaaaaagatgttcttatcattaaggtatatgatatgtattttaattccctaattaattactaaactctttatatggctctttctaatatctcaaaaaggagtgagcagtagatggacattgatcaatgatagaggaaccattctgctcttctctgctacatgatttaataagccaatataagctagttctaccatattctcttacagtcctgtctctaatggcaggtagtactaaataaacgcaggcttaaagagaattatttcctttcaactcttatctctcaagccaggctggactctagtcaatcaagatagagaccaaggtgtctattttacattcaagcaatatctgaacatgttacggtggacattcacttaaaaaaaacttccccaaatctaaactctctttctacatttgggaaattgcccacactctcagtcttggtgagaagccaatatgcacttttacagactatcttggagccccggtatgaacgtgtggctcagctccaccaatcagccgtatctgccctccattttgaaataggattttggacacagacaagtagccatggtagagagtccatcctggcagtaagggcagccattgaagctgtaacatggggtttctgtgggcagcagcagcagcagcagggtagttgcggaaccagtgtc

SEQ ID NO: 483384 - DNA, 1000 bp, Homo Sapiens
ggtttgaaaaaatttccaaatgcatcaggaatcttacagtaccaactcatcatttttcataacacagatttatgtcttcaattggagctatttagaaattggcccatagccacctgtaccctaaattttctctgggctacttggaagtatttagagaaatgtgagatggtagttgatgaaaacagagttcttcatcccaacagtaacagctagataactgactgcttggccaaacatttgactcaatccagggaatggaagatgccattcaaagccagattccagtttgtgttaaggattatatttctgtcatcacatttccttgacagtcccgccaactaaaaatcccccagcaaaagcccagtgattaaattctcctggagcatatttttccagcttctggaaacaatctgctgcagtgtctcctgtaatatccaaaggatagttccatttctgaggctgatatatggaagtagattactcacaacccaatccatcctcccaccaacaatttgattttgaaatgactatggaaagactgtggtaataaaatccccatccactgaaaggctgttcctgtttaatatagcacgtcatagccgcactttcaaaatgatgatatgttaccgaaatgtgactcagataagcaaaatgtcaccattagacttttaaattaaatgtagagacactatcattcatggtcatatgtagaaacattagggaagcactatgctatgtccaaggacaaaatgaaaataagctcaggagacgtcagatttcgccaaaagtaaaatccttggacacctacttttatttttgacttacccccaagtcaagtagatatttggacagaaagacagacattttcttctgatattttagggatcacagagtccctaagagaggtacctgtaagtaccattcgatccgtggcaggtttagatgttacaattctaactatctgacagacatttctggctagattccaatggtggtttgc

SEQ ID NO: 483385 - DNA, 1000 bp, Homo Sapiens; identical to SEQ ID NO: 120116

SEQ ID NO: 483386 - DNA, 1000 bp, Homo Sapiens
gctttttcataagtgcaactttttaataaaaatttacatctagataaacaatcttcagatttttgaaactttaataagattttaaaaacatcatgactttgaactgaaaaacatacacgtttagcacacaaatattgtaatatgaatgaactccaactccatttgaaaacatgtgaatcaaagtacagttttagaagttagtaattcacatttaagcaagttagcgccttgctgaatacagcctttgtaaaaaagagacttagtgcatattttaatggtacactgtggttttgtaccatttggttgagtttttcgctttattaaacaagttcttgaaagttggtagataaaggctaacttcctatgacgtgaaatttccaatggtaacagttacattttgtaacagaacactttctatagatttcttttcctagcttaaaattttaaaagcaatcatttgtaaggattgcatcaacatcaatttagcagaggaagatcaaactttattgaaactgcttgcatacaaaatatattgcactataaccaaacaaatgtcaacataaaatccaatctgttgtcgctaatatgtacagagaatattgcccaagagcagttacattacaaggtcattctaccttggttaattatctacagtattttaaaaccaaacagcttacagatgatgtgtgcaaggtaccaatttctgttttcaatactatacattcccagaataaataactagaaatcaacattaatgtttggcaatactttttaaaagactttttaatatttgtgaaatcatgtgcagtttgttgccattttatatgcttgtttgtatgcaaggaaaagtaactgtaaaatgaaaattcaaagaaacaaactcacaaaatacatcagaggcagaacttcagtttttacggctctgtacagattcagtggtacccctactaggagttactttttaagaaaaatataacatcttagagtgaaggtccttcac

SEQ ID NO: 483387 - DNA, 1000 bp, Homo Sapiens
ccaagtacaattttttaataaagataattacaaaagatggaaaaatcagctcagaaaggccaattacttctttaatagatcagtttttttgacataataactcacatcaattttaaatactatcacataaagcatggtggagaaaagaaattttgcttcataattagaaaaactcacaataaaacttgccaagaaaaacaaaaacgaaaaagccatttgaaaataaatacagtccatgccaaagtagtataaaatgaagccagaagtcttcaaaaagaaaacattttcctttcaatattttctttttaatgattttctgaaattggtgagactgtcaaattcaggggttgctgagctgttctgatttggttcctttggtatctgttttttcaccactgttgtccttggatttatcttcttccttaacgtctgtttttttgtcctctgtttctttcttatcttcttcaattctagctttctttgctcctttcttatgatcagccacatttcttcgacctccttctccttcatcctcagaatctgagaattcttcatcacaagctatccgcttgtctgatgctcgaatagaaattctcttgtctggatcttctccatcttcatctccactgtcttcatgaacagcatcttctggaatagcttgcatctggacaccaggtgcatgaggtaacatgcgcaaattttcaaacaaacgctgttttatcttttccatatattctggagtgttctggtttgtcatgtttgaaggactaatatgcagtttgaagtctggtccaaaatactcaaagtaatcattatatggcaactcattgggaatctcacaatcaagggcaactgcagtctcatatgtccaacatcgagcaacattacggattgtgtagccacctcctccaagcatcagtaatggtaagttaaaagtttttacaacttctacacatttagcatgacctaagacaagaagatttgggtaacaacaaaatct

SEQ ID NO: 483388 - DNA, 1000 bp, Homo Sapiens
caaagtttaattcaattttattttccacttttagtatttttcaaattatacaacatgcagtctgccagagtacccatacatcttcattttagaacctagaagattaccaaaattttccgtgggccagaggagggtgacttccagatcttttgttacatggactatagtacagcatcgttattgatataaaccaccattctcccctcaaaccccccggacaagtttgtccacaatttttttaatgtgaaagctactgtacagatacataaagcccagagaacacacatctgcagtacacaggacacactttacaaactagacatgtataattctacagaatgccctattccccttatatctgcacacaatgaacagtatttaaaactgatacacaatttttaaataagtaagcagacttcatggagcggcgcttacttcggcagttatccagccattattcaatgcttggtttaaaaagtctaaattgttagtgttaaatgaagcaattttagattatgatggtttctttagcttgctcaagattctgggctagacaatgaagtgaaatcttccctccaccctctgcctttcccagtatgtcatatagctagagtccaaatgtctcctgccctgctttaaaaaaatgcacttcgaaagaggggattgttaagaacttttatttgctttgttatttctataagaactagagcttctttatgtaaacgttagggctttaaaaagtcactagatgctacattctagacaaacatttttatttcttcatttatcccaatatatctataaattctgatttcttaatcacgattctatttcctttaaaagtcttaacgcgaaactgttattgttctgtctactacctgctgtttaacaaaagcaaagtgtgcagcatttgaagagatgatatgtttgcacagaattctctagtaattgacaaaaacacatttggcattatatattttagttcccagacataaatctt

SEQ ID NO: 483389 - DNA, 1000 bp, Homo Sapiens
ctttagaacattatatttcataaaagacaatgataaaaaagtacaaacatttccatgagaagcaaaaaaagaagtgggatacaagaaattactagcatttatttcagtgcatttatgtagaagcctttcatctaaataaataaaataatcttaagtacacttcctctttctgataaacaatactataaccattttagttctctcaaccggcatacttgcaaatacaagacaataaatctacaacagtatgtatttgaaaaacacataaagaaatatatcaaagacaagcaaaggccaaataaaatgacaaaatctgctttcacttgtaggaagcctccagaaagagaatattgtattggacatttttccattttgttttaaaatatcagtatcttggctggcaaaagggtatataaggaaatttttaatacataactgtatctacttaatattataaagttttcttactgaataacttttcacaaaaacaaaaacttaaatgtagatttaaaaaatactcataaaaccctagttttagcaaagaattaactatctccactgtgaattatatatagttccagcaaatgtgtactcttctccttttcttctctacagacaggcccattagtcattacttctttctgtagttgaaaagcaccatgtaattttcccagttagtgccatagggacctcctattagccctaggtccacatatacgggtttcttgactttgagactaggaaatacaacagataagttatcagaagatgtcttcataatttcagaaagatctcaatttgcttgacttcatttgtttagaaatgaagtaataatactccttccatagacatacctagcattgcactggatatggaataggcaatcaatacatgctcattaataaatcctccaaacatcctataatttgcatttgcaatgtatttgttaatctttatgtaataattaatacaatgaagataaacgggcacagctctgtca

SEQ ID NO: 483390 - DNA, 1000 bp, Homo Sapiens
gccaagaaagtgctttaatgattataaagtgtccaaaatatactggcagaaataagcggatctgagcgtttctcttcaaacctaggatatgcagggtgagagcatggcaggggctggtgggccccagggttgcctcgaggccggtcgtccagggagagcagcagcaggaagagcctcaggagatgaccctcagggatggcttgtccttctccagggcctgcagccggtcctccatctcctcagaccagtaaatgtcgtacaggaccagctgctccaggaggcagcccggctgccggacgctctccaccagctgcaggatgccggcgtcccccaggcagttgttgctgaggtccagctcacgcaggctgtggttggccaacagggttgcggcgaggctgctgcagctgctgtcactcacatcgcagtcggccaaccagagcacccgcagcacagagccaggctggcccaggccctggcacagctcccgcacgcccgcatcctccagcctgttgttgcttatctgtagctccaggagaaacctgttctgggccagcactgagctgaagtgggagcagcaggcggctgtgaagctgcaggacttcacccacagcgactccagctggcagccaggttccagcagggtctcacacagcagtcgggcaccctcatcccccagctcgttgccggccaggctgagctccttcaggctctccttggccctgaggacacggcacagatccccgcagcccttggcagtgatgccacactcccagatccacagggtcctgagcctggagctggggtggagcagccctgggcacagctccgccatgcccacatcacccagcttgttgctgcccagggccagctcccgcagcgaggccttggaggccacaatgccgcacaggtcccggcagttgtctgatgtcacaccgcagctctccagcttgagcgcctccagctggcagggggagtccttcaggccctggcacagcacacg

SEQ ID NO: 483391 - DNA, 1000 bp, Homo Sapiens
gctaacttttaactttcttcggacaagtgactattttacagaatagggaaggaagattctataggaatatcattcattttaagcattgttatattggggaaatttctctcagtaatcaaaagaaaaattttaaaatatttaagaggcatgtatttaaaaaatattctacatctataagattttgtaatttactttggatttataatatttctacataatgacatttgacaattttttgtttgtttctctaatagtgaatcagaaactattaaagtggccaagatgattttcttaggctctggaagactcaggaatgcatccacttgcactttcccatgcatggggaatcttcagagttttgcagccatgaagttaatatgtggtttcacaaggggaaacagtggcagaccacgcttgaattcggtcatgttctgaatcacttcaggttgtggcaaggctggtgcttgtgacaaatttatgtcattttgacatgggaactctccaacaacaggacaagaatccatttccctggcaagaacatggacggataccttatgtctccttggagcatctactgccaacatttccttgtagaatttgatgatatcttccttggtaagtgtctttaaatatgcaacctcagtgttatctctgtcaaaattatattgctgggagatgatttctccccagtatttagcacactcagcagatagcttctttggtttgtctagtcgacgaattgctaatgcctgaatgtgtttttggaaggcctcttctgtcatgtcctctatggacttttccatggtaattaagaaagcttccactctgctttctaggtagtgaggtggcttttctgactggatgatgaatctcaagccctgtatgccattagctcgacgtggcccgctgaagacgatatagcccaactgctccttggtgcgcagggtgttgaagcaaggttccgagataatctgacagaagagctccagaaacatattct

SEQ ID NO: 483392 - DNA, 1000 bp, Homo Sapiens; identical to SEQ ID NO: 309667

SEQ ID NO: 483393 - DNA, 1000 bp, Homo Sapiens
gagacacactcacacattttattaaggctcttaaattgaaactcatcattttggatgtacattcaaattctaaacacaacagtcaaaatgcagtgactgtaatgaaatgtaataacctcctataaagaaacgattggggactatcatttttgtgatttaacaacagagaaaatccaggaagaatgaattgagttccttctaggagttgtttatccctgctcatgcttaagattgacgatttcgtgaaataaagaacattatttgagagaaaaaaaactgattttttttaaagaaatcatcactctcatttgaaaggtttgctttcttatttcctgtaagtacatttcgtttttctaattcaactgtaacctcaggaccactgtacagcacttagtaaacctgtctttgtacatgcaatctagttcttaccaactgccttctcaaatggaatagaactataacacacaaataaaaggaagatgtacaagcacagggacaaaacaggaggaaaataaagactagaatgtgaatctcattttcaacaagtatcagcaaggaaaatgagaccctggtttcataattaattaaatctgcagaatgccaattccatttggtgttaaacagtaacccaatataaaccactgattctggaataagattaaaaaaaaatacctgagtgaatataacaatatggatagaccaaaaagaaaaaaaatctcacacacaataatcactgcaagaagatcccacaggttatagaaaacataaaggaactttaatatccaaacattcagggtaaagaatactggattaatcacccattaagtgtaaatcacttcaggttctttacagtaccagaaagtaaaatctaaattttgcatattgcagagaatgaaaccattttaaaaactttaatttccttacctgatactaataccagtatgatttttagacggaaaaactaagagtaagatttaaaccaaagatagaggtgttcctg

SEQ ID NO: 483394 - DNA, 1000 bp, Homo Sapiens
caccagcagcgtcttccctttattttagtttattaatagaatacagagtgcaggcacttacagtggtcaaactgagcgaggagtgggtgaggtctcctcagagagaggccgccctgggcccacccatcagggaggcatgggcgggagctgagaggcccccaagaccccccgccaccaccacccacatagcccaagcccagccaccctgggggacccaggaggaggaggaggagaggaatagggcaaggccggcccgggccaacggctccgggcctagcaaaggcacctctggcagccgaggctgggccaggctcaggctgtgtggttaatatggccgggaaggactatgtacacctcaggcctgccagctgggcactaccgagcccactgggccaggcttgccgctggggagctcctgctaatgggaagttgatatacccctgcaccccagcaaggcctggggatgtaggcgcccttggtgcccgcacttatagaaggcctgccctacatgggcttcttatctgggctatttatttacttatttatttttgagacagagtctcactctgtcacccaggctggagagccctggtgtgatcatggctcagcacagccttgacttcctgggctcaggtcattctcccacctcagcctcctaagtagctgagattacgcaccaccaccatgcccagttaatttttgtattttttgtagagacagggtttcaccatgtttcccaggctggtctcaaactcctgggctccagcaatcgacccaccttggcctcctgcaaagtattgggattacaggcatgagccactgcgccaggcttgggccctgtttataatatacatttggagggcaatgggaagcccagaacattcaagcacaagaaggattttcatcaacagcatctgaaggaggtggcactgagctgagccaacctccacagtgatggctgggtgacagtgaggttccagaggtgctatttcctaagggc

SEQ ID NO: 483395 - DNA, 1000 bp, Homo Sapiens; identical to SEQ ID NO: 309668

SEQ ID NO: 483396 - DNA, 1000 bp, Homo Sapiens; identical to SEQ ID NO: 309669

SEQ ID NO: 483397 - DNA, 1000 bp, Homo Sapiens; identical to SEQ ID NO: 309671

SEQ ID NO: 483398 - DNA, 1000 bp, Homo Sapiens
attttcataactgagattttattggttgaggatcagtacagacatttcaatttgtacacaaatcttaacatacgtaacgaaattctaaaaagccatgtattgtaattcttttttaaagttattccagtgactttccagcttaaaatttggaagcaaattttccttaagaggctatcaagtaccagtatcttcacgttggtcagctgttacatacggcccaccagttcacaactcaatagcacgtacactacatgttcaaatctgtaatctttcacagcacagtaacaaagttattaggaaaacaggactaccacaaccaaagatgttacagagtgcacacaattctggcagagagagccatgatcaaagagtggttttctttaggaaacaattctactaaaaaacaacatggtaatagaagtaatttaaaatgttcaagacattaaatgcaggactgactccatattgccatttaatatgctttgtattataggatataaaaactaaccccccatctgtggaatgttaagctgacacccgagacagtcagagcctcccataattcaatatcccacactattttctggttgtaccaaaaaataaacaaccagcaaatgatttcacctcttaaaaaaaagcatttacacttaaaaaatgggatgaggtgggattccctccttcttaaaaatgtttctagagctactaaaaaacttgcatttacaaaatagttgataaaaatattcctctggattgtacaagaagggagacagggaccactgataagacatggtatatggttattaatcagacttggcttctttctctcctgcttcatcagaggctggactctcctcagtcttcgtttccccgttttccgcaggtaagtcttctttagtttcttggttagccacttcggcctgttttccctttgctccccttttcccttttgtttgcacttttttgtctgaagatttatcctatgatagaataagaatatatt

SEQ ID NO: 483399 - DNA, 1000 bp, Homo Sapiens
aaagaaaatcaaaaaaagaaacctcattcagaatgaaaatttataatttcaaaacacagtgtacttttcagatataccagtggtggtagtgaacaatacaatgacatttaaaatagaacatgtataggctacaagtaaaaattgtttacaggaaaaaaattttttttattgaaaagcaatcattggccaggcatagtggctcatgcctataatcccagcactttgggaggctgaggtcagaagattgcttgagcccaggagtttgagaccagcctgggcaatacaaaaatataaaaaaataaaaaataaaaaaaataaaaaaaattagctggctgtggtggcatgtgcctatggtcttagctacttgggtggctgaaatggaggactgcttgagcccaggaggttgaggctgcactgcactccagcctgggtgacacagcaagaaaccagaccctgtctgtctctctcacacacacacatgtacacatgcacacaaaaaaagaaagacagagagagagagagaaagagagagagagagagagaaagaaagaaagacagaaagaaagaaagaaagaaagaaagaaagaaagaaagaaagaaagaaagaaagaaaaagaaagagaagagaagagagaaaagaaaaaaaagagcacttattatggaaccaagtgaaatgaaattgtgaagtcaaatgtaaattcattcaaaacgttaaaattgcctatttttttccctctaaaaaagtcactaattacaacaccaaaaagaaacctaattatgactaaggaaaacatcagatctgttgctattttaatagacaatgacccttagagggctgtcaaaagtgactacaagaaattcaggcttttccacatcatgtatttttgctttccaaccacaggaaaagaaatctagactgaattactgtgtatggtcactaatactcacatcactctcttctatttaatctgtaatgggcttttaaaaagttaacccagta

SEQ ID NO: 483400 - DNA, 1000 bp, Homo Sapiens
ggtctgttttatcacttttcatgagaataaggccagggggctcttgtaagttctttctttctgatttgctgatatgactatacgcatggcccatatttcttttaatttcatgtctcttagagtcatttagatgctaaagtcagccctctaggtacaaaataagtagtaataattgaacatttggaaactaaataccatatttgtatattacagagatttcatttggggactttcttatgaaatgtcaagtatttttgagtctcattaaaaagaggttcctcctttcaatacaatctccaaccattactttgttactctaagtctttgtctcttctgtacgttatacttttatttatgattttagagaataaagatctgaatctaattactactctttcaaataagtgtattagttttatataatatcatatcacttcatttaattttcttaatcttccaaaacttaatagctattagcaatatatttcagcaaatttcttctagtatctgaacaatttatgcattctatctcttaataagacacttggtaattttccctccgagctttattatatatataaccatttcagttacactaactgatttagttctatcctattaacccagctgactttttccaatttgctaccagggactaaaacatttcaaaatttaaaaatactttgtagcatgtagaccagcaatacaacacaagagagaagaagaaccacaaatggagcttgttaactttccatcatatttgtaatgtcactacaagacatgttttagggtggttctgaacagtcacagattacaattaagggtatcaaaataatcttttgaaatggagttggccaaattcatagggttaataacttgtttttcttaatctcagggcttccctggaataagaagggactctaggcttatcagttcagtcgggaaattaagccctatgagaacctgtgccttccagaatcccactcccttcttagccctg

SEQ ID NO: 483401 - DNA, 1000 bp, Homo Sapiens
acactgttttaaggctatgtatttattccttaaaaaatatgacttacatgaatattttctgttggacataatattgacaaaatatacacatgatagtactttaacaaactgccatgcaacaaatacattaagtaatgaagaaattgaatatatatgacctatctaattgacattcacattgaaaatttacaacataaccaatacttaaaatatttttcttatatttggcagtaatatcagtttttacaatttaaatttaaaactcatttgaatgtggatttggtgaaactgagacttttctctagtctgtgacaacctgaggcactaaacatttttctcttatttcactatcttcaaaggtaatttttttgtttcttttaggatctatccaagagttgtgtattacagcattattaggcaggggatcagcttctactatagaaacaactcgctttttcattttacttttcaagaccttttgaaatttttgtctagtgaatgcatataatagagggtgaaatatagttgttccataagccatgactaaaaaacacaatcttaattttactaaaaggtcacttgggcctaaacataaaatggtggtatttaaaacagaaattggtgtccagcagagaagaaatgtagaaataatcaataaagacatcctgaagactctcttttgtctttctcgtcgttcacggtgtcgtttcacagctcgccggagggcaattattacagaaactgaagttcttacaccaaagactacatttctcccaccactgctttgtgacatgtctgtagcctcatgttgtgtggttagagaaattgtctttttctttcttgctttcttcttctgccctgttgaaaatcttgtgcctattcgaatattaagagcctgaagtattttggtgtatgtgattaacattactacaacagtgaaaaagaatattgggatctgtactaacaggtgataatacattcccagttcagtgtagtattc

SEQ ID NO: 483402 - DNA, 1000 bp, Homo Sapiens
aaaaatcgaatacctttatttgtgctcccttaagcagcatgtgagaagtggcagtgacctcagcagcaggcctggtatctttgccctgttgagaagccaagatctcagctgtactagtcaggtgttttttcagacagcaagtagaagaggtggtggccaactccagtgctgtatcctggaggaggtccgggtcagcactgggcaaggtaggtagctagctgcctgacccctagtctggggttggaacttctgtttgcctgagtaaagggatgtcagtcctaagatttctccacattgtgtctttcttctgcagtggtaaaaaggctggtccttgaattgtcctgcatggtaccctaaggcaggcccactggctctttttgatcaaggattctgagaaaagctgcccttggaggcccttgaaataacatagggagcagaatgagtgctcgagtcgtggctgacacagtccagctcacactgccatcacagaggctgagtgagcagtcacccagggagggggctcccagctcattccattcccatggggcaagtgactagaaggtaagagcacccgagtaagccagtgccttcctgtatccacacccaggaataccttccagttgtccaagcagccgtagttgtaaggattcctaaatactctgcccttggcctgtagccgacgtctctccttcttgttgatgtgcctttcgatgctagtctcacctcgactgatgagaacagcatgccatacagttagggcacccagggcaagtgccacagaactgcacaggaaccagaggtagacaagactcttgtgagtcatcctttctcgaaaggagaaggtgggtggtggggtctggtgataagtctagaaaaagaaaacagcaaagctggctcatttgctctgtgggtctccagcaactgcccccagcacctataggcaggaaatgatccaaatccaggcagagaaaacagggtaaagccacagaggagttagggt

SEQ ID NO: 483403 - DNA, 1000 bp, Homo Sapiens
acagcgatgagataaacatgtatttgttgacatggaaagaggttcacaatgtacagttaagtgcaaaagcagattataagaaaacagtgtgcatagtaggataccacggtggcaaaatctatattctatatattcatagaaaaaggcctagaagaaaatataacagtattcaccccagagagtgggatggccaatgagtcttctttctgcttctattttctaatctttctacaatgtttgtgtagtcagttttcctggtttgctttttttttttttttttttttttttttgagcacaggtgggtcatgggagtcacgctctcatgctgcctgtcaagagcatggtacttgctacaggggctactccccagcagctctgcttaagaagattctgggaatgtcttgagtctccagaacaaggaacaagcacttcctgtgcccagggaaccagcagcttcccacttcttctcacagcaaccttgtggggttgaggttttctgtctgcttgatggaaaagaagagcccagagaggggaggtacctgcctaagttcacacagcagggatttaaagccgggtcacctggcccagagccccgggggctattaaagcttatgaacagagcaagcagctgagcccagggaagggctcaacattctcccgtgatttccgctgtgttgacaagctgcaaatgtgccaggaaaggactgggtgtggtggctcatgcctgtaatccccgcactttgggaggctgaggtgggcggatcacctgagctcaggagttcaagaccagcctaggcaacatggcaaaacctcgtctttactaaaaatacaaaaaattagccgggtgtggtgacgcaccctgctactggggaagctgaggcaggagaactgcttgaacccaggaggtggaggttgcagtgagccaagattgcaccactgcactccagcctgggcgactgaatgagactctgggtctcaaaaaaaaaaaaagggtcagggg

SEQ ID NO: 483404 - DNA, 1000 bp, Homo Sapiens; identical to SEQ ID NO: 309677

SEQ ID NO: 483405 - DNA, 1000 bp, Homo Sapiens
aacagcactgtgcagttttattaaccattcaagtccagtagcatctggtaagattgggacagaattgggattgaaaagtgaacagatattcagcatctaacagttcaaaagaagccactacatactcttttcacaaatatgttttcacagagccaatacagtactagccattaacccagtacaccaagtgtactgaagtagaaaagatgcaacaagaaaaatagctacattagaaagaccaacactttagaaaaagagtaaaacactttcagtttctcccctttagcccctaaaacaacatcttacagtctggatctggatctacctatacagtcctacattagcttctaaaatatttgtcaggagggaaaaaataaaatgacactggccagtacagtctttggatatttaggaaggggatggggagaaagtcagttctcagaacaaattagtcagcttcagtctcgtcagcagggtctttggattctttgttcttccgcacttcttcaatgtgcttatccttctctcgcaaacgttccagtttggcagccatttgtgcctctcggttctctttattagcttccattttgtgggtcagtttctcttctgccattttactgaagttgttgttctcttctattgccttctgaagcacttctttctcgtgctctcgtttctcagccagctgcttcaagacctcagcttcatgggactggaaaaaaaagtttaataggctaggcactctaaaatgtattcaggctgggtgtggtggctcacgcctgtaatcccagcactttgggaggccaaggtgggtggatcatttgaggtcaggagttcaagaccagcctggccaacatggtgaaatcctacctatactaaaaatacaaaaattagccgggcgtggtggcgggtgcctgtagtctaagttacttgggaggctgaggcaggagaattgcttgaacccgggaggtggaggttgcagtgaactgagatcgtgcca

SEQ ID NO: 483406 - DNA, 1000 bp, Homo Sapiens; identical to SEQ ID NO: 120117

SEQ ID NO: 483407 - DNA, 1000 bp, Homo Sapiens; identical to SEQ ID NO: 309679

SEQ ID NO: 483408 - DNA, 1000 bp, Homo Sapiens
ctactaaaatatattttaatagctggtgttaacaatttgcataacaaaagccaaattatattagtaacattgtaacattccgtgaagccccttcatttgcaaaacattcaatgttttcttcaaaactgttacactctcaaagttagtctcgcaaattaatcatcaaccacaattctacatattttgaagcaaacagaagccaaactgtacaatggttcaattttgatcacaggtcaaacatcaagtttcacaccatgcctgtaatagacttggtgctgcttcctaaatgctcagcaattcattgcatggacactggagaatgggactgtgatgcagttttctcttttcctttaaagtacatcattcttaacagcaactggattacaaagaagtgatactatgcaaactggataccatgtatcaagcacaaaaaatcctatggcattcccaggaatatactgaagtcatacagacaactgagaaaatttgctcaaagattcttccaagtttatgggttcaagtagtctaagcatcacagaataataaccacagaagcaacatacaatgccttgacttttttgatcaacagttgacagttagttgcgaggaaagggtccaaaaggcatggaatacttcagagacttttattttagcatccttgtcagtttacatagcttcttacttaactaaaagctctcccacctccatatcaccttaaccaaaacaaccacaatctagccacttttagattatcagaagcaaatcgctaaggtataattaatttatgaagtgaagttcatcttgtgtagtgaatccagcctcacaattattctatcttacaataggcattttaaatcccaaatctaaagttaatgtttatatagctcaactctatataaatccacaaagaacctttcagaaatagatggaagaagtcggcattttctaaagttctaaatctttagagataaaatacaatcagctaacacctttaatatct

SEQ ID NO: 483409 - DNA, 1000 bp, Homo Sapiens
gagacaaagtctcgctctgtcgcccaggctggagtgcagtggtgcgatctcagctcactgcaacctctgcctcccgaagttcaagcgatttttctgcctcagcttcctgagtagctggggctacaggcatgcaccaccatgcctggctaatttttgtatttttagtagagacagggtttcgccatgttggccaggctggtctcgaactcctgacctcagttgatccacccacctcggcctcccaaaatgttgggatttcgggtgtgagccactgcgtccagcctgggttgttagttttatcatcaccccagcacagtacgaggaggctaacacgaaatcctgtctctgggcccaggagctgcaggaccagggtgagtaccagtgatgctctgaaacttaagactggcacccatggggtggcagaggccacagctggtggggaccaggagtgccttgtgtctgccgctcagccctcctgccctgtcagcacacttcctggcagggccagccctccccaacgcgcccccagccctgaggtgcagcttccgcctgctgccggcctgccaacggggacacacaactcaaccacctcctaagaaactggctggtcaccagggtctgggcagaagctacaccccagcctgatcgtaaaaggggccaccagtgaccaccacggcattcacccatcagacaagcgacaatttacacactgagaacgctgctgccctcacgctgcagggaagggcagggtacattcacaccccagcgtaggagtgaaaccactttggcagtagcaaccagaacacgaagaggacaatgtctggggtggagcgaccccatgtctgagggctgcgcagacctagggtgtttgcacaagcactctgagagaaagagggaccctgctgggttggtgaccaggctgatcaacagaaaagacggatgcctgccaaccagagtttgagagcagacgtccaggggtggccatctgccgggacgcctg

SEQ ID NO: 483410 - DNA, 1000 bp, Homo Sapiens
gagagatcttcacgacctttattgcacagactgggagagaggagcagggttatacctcccaaccccaccatcctcttcatttaaagcatcagcctcctcccctgccatttccgttcagggaggcacagtgttccccatctgtccagggctgcaggtccggcagcggggccccgtcccagctccccaggcctggtgagctccaggctagcctgtgcactgtcctctgagtccaggcccttgtaggtccccaagatggtgggggtgcagggacagagagcttgctgttctgctcctgatgtcacacaggggcttcctgtgcgtcctggcatcaagatggccttccacaagtcaagtggccacatcctcaaggagctggctcagccactcacagctcctcccgaacccgaggtgcccttccagtcttgtcttggaccctctggtgcctgcggctagggggctctggggaagggtctttgctgggcatttcttcctcttcctcttcctcctcctcctgtgactcctgcagcagttctttggcttctgtccactcctgctccctgtgctcaggtgcccacgtgtgccacagtgccagggcacagcgccgtccccgagtcacggcccacaccccatggggattctcgacaccggagctgaaggccacaaggcgcccacagcgaggacgcacccgagccgtgacagtgagggcgttgggctccgtgaagaacaggtccccaccctggaagtcatcgttgaggtagaggagtccgctgtagtcccgataggtgtaggctgggggctcccgccagcactctcccgtgtcagggtccaggacgcagttgtctgcgtgcactgggtgactcaggtccatgcgctgctcttgctctccttctatggcgctgcggcacaccaggtgggtgaaggacagatgcaggggccgttccggggagaagtaggcctgggtcaaggtccgcacccgctcgctcacctccagaagcagctt

SEQ ID NO: 483411 - DNA, 1000 bp, Homo Sapiens
caagctgaagttttatttaaaatgtaaaagaaatgttcccccaaaatgctggtgaataaagcaaaaggataccatacagtgctctcttcctacgagttagccagcctatccaagtacagggcgatatacagtacttaatgctggtagaatttcacagtagtttagtgttaaagattatctgtgcctagattatgaagagattctcagtgtgtgatgtttagttcagggtttacatcttactgggcatgaacaagagcccctgctccttggccatagccaaatcccttgggcccaaagttctttgcatagcatcctttacaatagatttcaccttctttttcagtcagagttgttgattcaagactcttcccacactttgcacatcggaaacagtttttgtgccagggctttccagctccaattatcttctcggcagcatatacagaatccccacatctggaacacttctcagcacctccatatttctgagcaaatttagaagtgtttggatttgttgtaggcctgtgaggctgaacacttgtgaaaagaggaaaaaaaagtaggcaagagtttccacagggcccttttaagtacacaaggcaggaacaatagaactctgggacttaaccgctacactgcctcaaagctggaagcctttgcaggccagcacaggggagggaataaagaagaagtgactcaggtgccagccagagttactacttgaacctatctatgggctcattattatttcaaaaaaccagatagggacccaaacgtaaagatctgtccctctgagtctaaacagaattcatttactcctcagtgttggcctctccactaagcaattatgttatggtttataaaaacttaccagagcatatatttttactccagaataatatcactggaatcatacctagctttttacttcacaggagtcggaaaaaccactattaagtagtttaaaaattccacaaataggtaagttaactttggtctg

SEQ ID NO: 483412 - DNA, 1000 bp, Homo Sapiens
cagttttaaacatactgtttagtgaaaaataattcttttacaacaaaaacgattgttaccagcttcatataattaaaactgaaaaccaaattgtgtaacaggtagcataacatgtcagtttatattattttaaaaccaaatgttattccataatcatttatgcaacaaccccaaatttcaaacaatattgaacacaatacaaatttttcataaaacaaaacttttgggtctgagtaggcagtactggaatttaaactacaattaagagcctaaggggatgcttgctctattttaagtgattgtaacgcaggagtgtttaacagaaccacttgagcagctgtttcaaaacacatatacactccatctccagagatgttgatttagtaagctgaggtggctaccaggcctatggaatctctaaaatgctccccagcaatttctaatgaacaatactgtttaagaactattttctatgaaataggcttgacatgctttcagcttatatgtatgtgtatttttaagtatcttaagcattgccactattttgaaagaccaaagttatttacagggcatctgactttctgcggtaggtgtagctcctttaaaaggttatgtgctttttggttgagtcacttttcagtaattaagcctcaatctatagaaaatgagatgctctttaagtgatactttcttaaattaaaatttgaggtatacagataatcgcgtccactaaatgttacaacaggaattatttgtacataaatatattcaatatgcactaactctagcctttacaaaaataaagcaattgacaaaacacctattagagtatacctaccctgagaattatacacaatactaataggttttataaccagaaaaagttgacatcagagcaaatcttcaaatgttgtttccagagtatattcaacattttaaaatataaaaatagaaatatttaaaattatctacactgaggttacataactttggtaaaagt

SEQ ID NO: 483413 - DNA, 1000 bp, Homo Sapiens
aggtagtggtttatctttttaatgaagccataaagctttccatatctatatcatattaactcttttacttaactaaaaatcacagctgtgtttaccattttaaactacgtctgggggaaggtaagtaagacacacttgacagctactgaaaactacacagatggcaatttcttcaaccctttgttacagcaaaagagaaggaaagaaggggaaaaaaagccctcttaatgaatatcaactctcaaagcttcacctggaattctagtgctattaaacaagtagccaagacacaaacacccagcttgggtcactgaaacttcaaaagaagcaacaactgaggctaattctcgatttaattttgaggacccataaaaattcagctacaaacattcaaactagtctggatgcctagttccagcactgggttgaagccaaaatcaaagcaaaatgtatatattttaagagtctatttctagaagttttgcatgtaaccattttattttgcttcaggagattaaaggaggtcacagcttaatcaccttgcattaaacccatcgttttcagggctttgaattgcaatggcaagtttgtgtcacactgtctttcctattcctcctcgtgtttatatttcttttgcttcaaagcagagtagatgcacagtatatcaagtaaataagttagtgcactcaattcatattcagttaaggtgaaaagggcaagtgtaagaactataaaggatcattttttttataaatgtcaatggcacttggtaaatgttgatgaaaataaacagtaatttcacaaagaaaattgtatggtatttctttctcaccttcattgaaaaaataacagaaagggctttggtttcaatttttgttctccttgtctaaacacactaagaagtttgaagaaatggttcagaaatttaatgcaaggatctttatgaactatttgaagcatgccactcaaaataaaccccaaatctggagtaaacaaaaaa

SEQ ID NO: 483414 - DNA, 1000 bp, Homo Sapiens
attttcatcatatatttattacataaatatatagtaaaatagacgagcaacaattaccataaaaatatctttctttaaaatcctgacccaaaacacaacggggtgaaaaatcgcacataacagacatactgattgtcaacgtggggcaggagtaggagcccctcaagtcacccctgccggtcccacccctccctggggaagagacctacctccttccctgtttctggccacaacccccctccccccagcccagcaccagcttctcatacattcagtagcgcctctgggcagtgtccccctcccccccgcccaggagttcccagggcaggagttactgtcctccttatggacggtctctctctcacaacgccctgccctctcccagccctgcagacccgccaccaggagaaggggtaggggctcctcccccaccctccccaagtctgagcagggaggaggctggatgaggtatgtgtgttatgagtgatgggaggggcaatactgagatggagaggcgggtggtgggggcggggtagtggtcatggctctggcaaccccttgtcctggcctggccccctcgtcctattcccagcaacccgtcctcccaccgatactgcacctgctgctccaccctgcctgccctagtgccccgggccaatactgggggaggcatgctgagcacccacatcaaggccatccccctcattagcaccaatggcccccaggagagggccctgtcccccacttccacagcagggactgggacagctgccgctctagagcaggtgcgtggcactcctgagtcgccctggctcctcccctaccatgtgtactcactcacacattcacgcagaggaacgcacacatacaccccacatcaccgagggggaagggaggggtccggggaggatgggatcacagctcatatgattggggagggtgggggagtcccaagtgcctataagaggctaagtctcttcaaggccttttctctgccgtg

SEQ ID NO: 483415 - DNA, 1000 bp, Homo Sapiens
aaacaaaaagttttcacaaagtaagtttaatatgaagatgtacagaacctaatttttacatcactgtaacaaacaagccttttggagaggagatattgtaagcaacaaatttctttgctgaagatagccattatgtatcgtcgttccgaggcttctaaatagatgataccatttcctcatattagcactattccagtattgctctgttgcccactagccgccatctccacacattcatcatgtgattcattaacgcctgtaatctcagctactcaggaggccgaggcatgagaattgcttgaaccccagaagcggaggttgcagtgagctgagattgtgccactggtgacaaagtgagactattaaggaagcggccgacatttccttcttttgtggcatccaataaaaacacattccctttattgaactttgttagagaatcagatgaagtattcttggtttcacttagcaactcttcatcacaaaatacctgctgtctttgacatgctgtagatcgtccctcttggggtttctgaatttgaacctcaattgcctttttaatattctgattatccaatgtggtcgcctggttacatctgctccttggtggagtttcttctctatatttagttatatctatcacatctgattcaatcagcagattatcttcaaactcatcaacatggtttgaacttgagtctttgtgctcccttggttttagagttcagatgctctcggggtggtttaaatccatcattatcttctggagtgacagactccgaggaaacaaattccatttttttcccattgtgttgaaaaatggctgtcttggattcaggatctctaataactgaatgatattgaattcttgaaatattatcatatttcgtttccacagtaagctccttgggattattactgaactttggtggacatttctcagttttagcagttctaggatgtgtttccaatcctaatgggagaacttcaacttcacaat

SEQ ID NO: 483416 - DNA, 1000 bp, Homo Sapiens
agaggttacaacatgaatctttaatcataagggattgttccatcaggctaatttataaaaaatagctctactgttattataaaactgaaagatactttgttacaaagtaaaatacataaaagtacaacatatgtattatacattcagaatcccaccactagagataagtagttatatgtcctctcccacatctttttttctctgttgctctaaacatacacacagaaaaacatactaacaaaatggggtcatgctataattgttgttctaaaactctcctggttcactaaatacttcatgagcaacctgcactgtcattatctgtgtgcctgaagatttctagtggctttccattgcatacatatgcctgaacttatctaaaaaatttcctaccaatggaaactggaatattaacatttgctattttaaaaatgttttaaatttaaaaactccaccttctgcatgcgtttttgcccaagtgggcaactatctcccaagtatcaattactacatatttactgccacttcaaaggttatagaaattgaattgatacgttaatgaattcttttgaaaacaatgcacggattttctctctcaccaataagtacataagacttattacgtccatttttgcactgctataaagaactacctgagactaggtaatttgcaaaggaaagaggtttaactcacacacagttccacatggctggggaggcctccgaaaacttagtcatggcagaacgcaaaagagaaataaggaccttcttcacaaggggacaggagagagacagcgaggaagggctacaccttaaaaccatcagctctcatgagaactcactatcatgagaacagcaagggagaaatctgccctcgtgatccaatcatctcccaccaaggccctcctctgacacgtggggattaaaattgagatgagatttgggtggggacaagagccaaaccatatcagactgtttctacaaccccccccccgccccc

SEQ ID NO: 483417 - DNA, 1000 bp, Homo Sapiens
gggcagatggagggccttttattcgcgagggtcgggggtgggggtcctaggtggggacagacaataaataccgaggaatgtcggggtctcagtgcatccaaaacgtggattggggttgttgggggtcctgtagcctgtcagcgagtcggaggacgaggtcaataaatatccaaaccgccgaagcgggcggagccggctggggctccgagagcagcgcaagtgaggaggggggcgcgggatccccgaaaaagcgggtttggcaaaagcaaatttcccgagtaagcaggcagagatcgcgccagacgctccccagagcagggcgtcatgcacaagaaagctttgcactttgcgaaccaacgataggtgggggtgcgtggaggatggaacacggacggcccggcttgctgccttcccaggcctgcagtttgcccatccacgtcagggcctcagcctggccgaaagaaagaaatggtctgtgatccccccagcagcagcagcagcattcccggctacaaggacccttcgagccccgttcgccggccgcggacccggcccctccctccccggccgctagggggcgggcccggatcacaggactggagctgggcggagacccacgctcggagcggttgtgaactggcaggcggtgggcgcggcttctgtgccgtgccccgggcactcagtcttccaacggggccccggagtcgaagacagttctagggttcagggagcgcgggcggctcctgggcggcgccagactgcggtgagttggccggcgtgggccaccaacccaatgcagcccagggcggcggcacgagacagaacaacggcgaacaggagcagggaaagcgcctccgataggccaggcctagggaccctggcagggagcagcaggtggcggcggtgcatggggcctggccccaccagcgggcactggcccacagccacggccggggggccatatgggaaggtggatccgtggcccggggactggggaccc

SEQ ID NO: 483418 - DNA, 1000 bp, Homo Sapiens
gagatgtagtttcactcttgttgcccaggctggagttcaatggcgtggtctcggctcactgcaacctccgcctcccagttcaagtgattctactgcctcagcctcccgagtagctgggattacaggcatgtgccaccacgcctggctaattttgtattttcagtagagatggggtttctccatgttggtcaggctggtctcaaactcctgacctcagatgatctgcccgcctcagcctaccaaagtgctggaattataggcatgagccaccatgcccagcctatgcccagctaattttttatagagatggggtttcaccatgttgcccacacctggtctcaaactcatgagctcaagtgatctgcctgcctcaacctcccaaagtactacaattacaggtgtgagccaccgtgcccggccatcttttcaccctcttaacagggttttatacagagcaaaagttttcagttttgataaagtccactttactgatatttcctttatggactgttgcttttagtgttgcatttaagaacaactctacctagtcttagatcccaaaggttatctgttttttcctaaaagaagttttatagttttaaatttaagtatgcatgtgagccatgttaatttttgtataatgtgtaagacttaggctaaagttctttttttttaatcctatagctggtccagctgctccagcaccgtttgttgaaaggctgtccttcctccattgaattacttttgcaccttaaagtcagctgggcatatttgtgtggtcctgttcccgtgatgatctcggctctgtcgatctgtgtgtctgtgcctctgccagcattgcactcttggttcacatagctatatagtagatcttgaaatcagctggactgattcctcctctcactctattctttttcaaaatatttttgctataaatttgtatatgaattttagaataaccttgtctacatctacaaaacatcttctaggattttgatag

SEQ ID NO: 483419 - DNA, 1000 bp, Homo Sapiens
agcatgcctgatgttccttctttattaaatgacggagtcaggatgttgtgattacagttgaaggcgacgtgttagaaaggacaggtgcatgaaggcagagagtgcccacagactcggctctcgaaccggggcaggagggaacaaggtgagctgtgcagcccacaggacgggcgggctgggtggacacagccccccaagttggccaagctgagtctctgggcgagtggctcccaggagaggcctggctgagcaggcagagcaccctgggaccccagggcagaaggacccctgccctccagtccccaagacccaggcccgtctccactcatacacgccacctacatgtgacgtcagccctgaaaaggtaacaggaaagttcagaacaaaaacaaaaccccaaaagtaaaaaggctacgtgtagcagagtaataccagaaacgttatatacacaggcggtgatggccccctcggaagtgtccgggtcacttagggggcactgcagaggtccctgtggccagagctgcggggcctcagtacacggagctgttccggatgccacagcacagcaccatgctcaggatcatctcgaagatctgcaggagggtggtggggggcgcagtcagcacaaggccccgcggaaggggcagcccagagagcaggccctccgcccccgcccgctcaccatgatcacagcgaccacgatggcagcaatgccgatgaggtacagcttcccggagaagaggtcatcgatcttctggtggcagtcctcctgcaggggtggccaggcacgcgtggtcagggaccgggcctcggctcccggcttcccgttgtcacgcagtaatccgtggtcaccacagaaagcgtagaggggaatcctgggaacagccccccaccccctacccacctcggaacaggcgggtgcagcggcccggcctctgccggcttgctatcttccacccgttttaacataaacgcgaaatgcctgggacacactgtgccc

SEQ ID NO: 483420 - DNA, 1000 bp, Homo Sapiens; identical to SEQ ID NO: 309684

SEQ ID NO: 483421 - DNA, 1000 bp, Homo Sapiens; identical to SEQ ID NO: 120118

SEQ ID NO: 483422 - DNA, 1000 bp, Homo Sapiens; identical to SEQ ID NO: 309687

SEQ ID NO: 483423 - DNA, 1000 bp, Homo Sapiens
cactgtaatatttattaagtagatgacttacaagagggatattgatgaatgtaaaaattttcactcacagtgaacatgaaacctttacacatgtaaggtttagattctttttttttttttaatctgcccctttcagattatatcatggtatatgaagcactggtgaggtctatgtcaccagaaattcccagtttgctgatttcattgagttttttaacccgatgattgtactgcaacaagtgagcatcattcactgcaaccttgaagtggtcaggttcaaccagtacttgtattttgaatggtttcccactttcaaatgggaaaaccgactgtctttcttcccttccccagttattatccagctttgtattgcaaacaatgactctcctgttgttctcattgaagcgtgggttaaagtggaaggcaacatcattccctctttggaaatctaaagcaattctgtttgcattgggcttcaccgtgcccagaattgttatcagcatgcgaggcaccactcccccaggcaaaggcaggttataaggcacaatcagtggcccagcaggggcgccataggggccagtggcagggtaggctccggtggcacttggctgtccagaagatgggtaggccccagggccgctgggtggccctgggtagactccaggtgcaggtgctccgggataagctccaggtgctccagggtaggcgcctggaggtgcctgtccaggataagcccctgggggtgcctgcccggggtaggccccaggataggaagcccctgggtagccccctgccccagcaggctggttcccccatgcgccaggccatccttgagggtttgggtttccagacccagataacgcatcatggagctggaaagaaagacatacacaattacgggacagaaagcattctcaaaagcagaattttcaggaaaataggaatatgtgatctaagaaggagaggaatatggcaaaggcattacatgcatatcattaaa

SEQ ID NO: 483424 - DNA, 1000 bp, Homo Sapiens; identical to SEQ ID NO: 309689

SEQ ID NO: 483425 - DNA, 1000 bp, Homo Sapiens; identical to SEQ ID NO: 309690

SEQ ID NO: 483426 - DNA, 1000 bp, Homo Sapiens; identical to SEQ ID NO: 309692

SEQ ID NO: 483427 - DNA, 1000 bp, Homo Sapiens
gcaacatatacagaaatttatttccaaattgaagggggaaaggagggaagaaggtagtggcactaaccaaagtcacaaagcccaggttggaacaagaacaaatcactttggttcctagagccaagcctgaaggggaaacaggcagaagggaagacgaaatgggaagaaatatacggtcaatgggaatctttttctatctcaatgatttagttataaatagagattattagtcttctctctatacatgtaacaaatgccaaacttactaccacaaaatttctaaaactgactttttcacatttgttaaaaaaggtaaaaatcaaatacttttcttcccttccttcaggtcaagttctgaactaaaatattacatgtaacaacagctggtcctaacttttataaaaagtgaaactatatagagctcctttgccaacataaggagctacataatttctattacactacctaggcatgagaaactcaaaagcaactcaaaaggagcaagtccaggaaaaggaaagctatgaaggagagaaagactagcagatgaaacaaatactctgaaaaactccaatctgccattcaagtattggaaataccccaaaggggacaatgaatgggatctattacaacaaagtcagcaaagtaaaatgcaaatctcacatatgataaatggccctgataggcggtttgctgaaagacctaaggctagtgattcagtccacaattccttttggaccctaaagaaggggttcatataaaagtcatacttttctttttgcaattttctcttggttgtcttcagagaatagtcatttgcttctttcattcaggttatgcagatcatttctttaaacccccaaaagagtaataattttcatatactaaaaggcttcttgtagaaaatggaaaaaagaatatgaggccacagcagtgatgttaacggttactcttcattgcttctttagctgccatgatcagtggtgtcaagctagataac

SEQ ID NO: 483428 - DNA, 1000 bp, Homo Sapiens
ggaggactaccacaggagcctccacaccttgctgtctgggctggggtcagacggggcttagtcagccagctcagtggccaccagagccggccaaatggccccgatgccctctgcctgtgggctaacagctactgtgtggcagtagcccttgctgcagcagcaaaagcctctgtgtctcattgaggggactctctggctggtgctctgcctgccctggctgctcagccagccctccgggggtgagtatgtaccgacagtcactgggagtgccacccactgcccccatgccactgccatccccagccccactgtagggctgatccctgccaggtagctccaggctgcctcccgcagtgggctcctcagctctctcgatgttgatgtataaggggtcctggctggcagatagcacagacagctggcccaagatgttctccagttccattcgcagacaagtaaagctcgggcgctgcttggggtcagcactccagcactggtacatgagatcatacacgtcctccatacactccggaggctgtttcaggcggttcccgccaatgaggtagttgtaaatctcagcgttttcgatgccagcatatggcgtctgcccacgtgtcatgatctcccacatggtcaccccgaacgcccacacgtcactctgcacagtatacaggttgtcggccaggctctccagggccagccacttgacaggcagtttggaggcacagccttgacgatagtagtccccactgtagatcttccgggagagtccgaagtcagccacacacactgtcatgtcctctgccagcatgcaattccgagcagccaggtctcggtggatgaagttccgagagctcaggtactccatgccgcaggcaatgtccaccatgaaccggatcagggtctggaggggtaggttaaaggggttctccccaatccgggaggcgagcaggaaggcatgcaggtccccatgcttcatgaagggcaagatgaccatggg

SEQ ID NO: 483429 - DNA, 1000 bp, Homo Sapiens
cccatggaaacacttttatttctggaagtcagaagaaaaacaatgtgcacaacctgaatgacacagagcggcagcgctgaaaccacaggggctgccgagagctggcctttcacagcagaccactgttttccagtgagaatggtgggccattccaaaacaaagctaaagggttccaaacatccagaatggaagctgcttcccccaactccattacctatactacaggatggattgctttttgtgagaccccttcttccactgtgcaatttttgcattatttaccctcccccgatcttaaagctatatggcgtccaggagagtgcggctgatgcagcttggccatcactgtgatgcagctggagcagaaggcggcccgttcacttcagccagatccacttgtctcccacctcggtgttgtacccagggctgtacttgcggcccggcagctctctgaactgatgtaagacacggtcagtctgatgagctccaatggtgacttccgggagaaagataggaatgcttgtgtaattcagcacctcaaacttatcctgaaccagtaatcgcaggtggtataaagtgcgattgtcctgcttgagccacggccctttatcgaacttcaggtattcaatgtcctctaccaccttttttgaatcttgagcttcccttgcagaatattgtaaaacctcacatttttcactcatctcagggagaaaggttttcttataggcattctcaatgtcctgtagataggcagaggtgatcttcatttcatgtggctaaacagaagcagaaaaatcaaactgggaaacatttagagttcattctctttgacctgtgcgtatataaaatgcgaagacaatcactgaccaccattttcttacaactcacaccgggcactgtggggactgcggggtgacagcaaagaaactgggaaacatttagagttcattctctttgacctgtgcgtatataaaatgcgaagacaatcactgaccaccat

SEQ ID NO: 483430 - DNA, 1000 bp, Homo Sapiens
cagtgaacaacatttattgaacgcctatggcatttgtgctcagcattggactgtgtgaggcactaggggtgagtggtgaaacagggaggggaatagaagagccaacgggacacttcctatcagcgagaaccttgggagggcgtggaagtggggagggaagagctgctggtggcctagtgacaaaaaaatgggagccgtgcaactgggctgtatctggactgctcatctgaaagtcaatgtctggctgggtgtggtagctcacgcctgtaatcccagtactttgggaggccaaggcgggcggatcacctgaggtcgggagtttgagaccagcctggccaacatggggaaaccccgtctctactagtaacacaaaaattagtcaggtgtggtggtgcacacctgtagtcccagctactcgggaggctgaggcaggagaatcacttgaactgggaggcgaaggttgctgtgagccgagatggcaccactgcactttagccagagcgacagagcaaaactccatctcaaacaaacaaacaaacaaaaaaacccaaaaagccaatgtccacgatttctacctcccagttgtcatgtctgacatttgggctgatttcccctctgtgctcagtgcccgaggagagagcctctggggtcatcctccataaggggacaattccttccttcctggggatggcccccaagaggctggccttacccagaccccagaatctaagggacctgggggccagtggccttggcccctgcgctgtccccaggttgcctgatgctgctggactgcaaggcccgggaccccctctgctgctgcagccttggaggcgccctcacccctgggtggtcaccctctcggcagattcccgggccgtgcacaccccctcgtggttggtggtcggcacttttccttgtttggatttgctgcctgctctgggcttccttgggggctgccccggcctttgtgggtggcttagaatggagggtggagttg

SEQ ID NO: 483431 - DNA, 1000 bp, Homo Sapiens
aaaggctgaagtagtctgggatttttatctattaagctaaccatttgattcaggctgttgtaggacatgttcttcagtgtggacagctgtatggctgtgactggatcagtgtcctgctggtgtacacacaggtgaggacctggctggcgaagcatccccattaggaagcaggttaggaatgtgcttcatccctgttttccaaggcccaataaggatccatgtgatctttgagtgtagtgtgtatgttggttggtgattgttccaaaggttctttgaggtgattttcggggatctctggcatatccgtcaggttaaactccacggttttcctcctcacttgagatacttctgggtgctccatcaaggccccatcactctctgagagcaattcaaaacttttcttggccccagaactcacagtctttaagcttttgtctttggtgtctatgcctgtgacactgtgaagctttgacggcgctgatggttctagggggaagaacatgggagtggggctgaggggcgtctgtggggcactgtagtagcctggcctctgatacagtggggcagacttgaaggcgtccacagccttaagcttccaggccttgttgtcttcctggcccctaacgttctgtttggctgccttgtggtttttgggcaggccctcgtggagaagggattccctcttgggccacagtagtttggtccttgagtttgccctgggaggatggtgatcatgggactgcaggcctaggaagcggccaatgatgccagcgtgagcatcctcctcgtcctcctgattgggctggaactccatctcctctttgttcaggctggaaagaaacaggagatgcagggctgagccagtggacaaaggaccaacacctggccttacttctcccttacccccgctcctctctctcagttggcccaagccaaggccacaccgtcttcctcaccatgccccagctctcacctctctcctgatctgtcctgtacctcc

SEQ ID NO: 483432 - DNA, 1000 bp, Homo Sapiens
aaacttaagagataaaattcttatttttttcacacaatgacattgtcttttaaaaggaatatcacatatcaaagtctccccctaatatttttggtttcccttactttgctggtgccctaaacacatataccctgcttatagggtaacccaacagtggcttttaaggtggaggtgggctacaaaactggggaacttgaacaatggacatctacaaggagactggtgaataatgggcatttaattaattggggggagcgggagggttagatgtgaatggcagaatattaagaagggggttgtgtggaaggagatttgggagaagggagacttccgaggaagattaggcagagtgggcaggaagaccagctctcatgtgggggtgggaggctctcttccttttttgctcctgttcctccttttctctagctggcaggcctcttctcctgcacagtggtcctgtcggtgctgctgtggctggggcccttcttttactatctgcccaaggtaatgagcagaggaggcatgagcatggctgggaggggtagctgtattccaggacatcgaggtagtcagcccacctcctctgcctcaaggctgtcctggcttgcatcaacatctccagcatgcgccaggtgttctgccagatgcaggaacttccacaactatggcacatcagccgagtggactttgtgagaaatgccattacccccagattgccccctctcatcttgttagcatccccagcctctgccctgaaccaaacctaattgtcctggtcttaagttctgcaacccacccactcccccagcaaacataactcctagtatgctttactcacaggcaagggaaaggatggggtttgaacccctttggcctgaatatttgtaacttcccaactggtgcgggtcattacatttggtgtgtgtcccattgaatcaaccctgttgtttccttctgtcatgctttccacttcttcctggatcatctctccccatcactt

SEQ ID NO: 483433 - DNA, 1000 bp, Homo Sapiens; identical to SEQ ID NO: 309694

SEQ ID NO: 483434 - DNA, 1000 bp, Homo Sapiens
agaagaggaataatttatttctatatgattttaataatgttccctaagtaattagtaatcaagattttcttcaaattcaaattaacaaatatgtttgttaatctaaataatatacatatttatgtatttatatatgtatatattttaatctttctgtaattcagtctttaactgtgaacttttacatgatggaagcagtgaaggactcaatgtcatagtacattttgatagtatttgataggctttttcaggtcaattaatttagttgcttgcaaatataaatcaagcttgctccagttccacaaggactccaccacagtctttaggatggagaaaaatcactggttttccatgtgctcctattttgacctcttcacttagactgcggatcttcttttttttcaaatccatcacagctgcattaatattatccaccttaagaaagggaaataaattgaacacatttgagatcataaaaataccaacttatagtatcataagacttagaaaaaactttgagagctcatgcagtctatctcctctgcctgtgggcaggaccattcttaaatcatcataaaaaataagcttaaaattttcagagaagtaaaagaagttactaaatttttctaggtaagcaaccacaatgctcagaattttcaccattagtaaatgtttcttcttataatctaaatcatgtatgatatactttataatagtttattctggcagtactattagtgagattgaagacattgctttttcctgagaaccctgggtcctcatctataacaggcaaatgaggtctaccacataaattgactacagattaaaatgaggtaacagataaaaagctttcagtacagtttatggcataataggtacttagcaaatatgagtgtttccctgatccccaaaacttgccctgccaaaacacctggttattacctttgacattatcaagacacacatgaaaatcactattaaattgccatcaaaatgt

SEQ ID NO: 483435 - DNA, 1000 bp, Homo Sapiens
gcaggaacagtggtttattgaccaggcaggcctccccagcccggccactgctccccaaggggctcgggctgtgtgggctggccttggcagaaggtggacaatcctctaggtccaaggacatgggggtcacagaggtgggggccttgggcccacacattcgaggagagttcccaaaagtttccagtggctgtcccaggcaggtatcaggttcggcccacacctgagtgcccatactctgggcagggctgggaggcacctgacctcacctccagcagctctgcaagtgtggggtgaaaaaaggtgaatctgtgtgaggatggggttggctgcagctgtggtgatggcctgggcgggggcggggggtgctggaggctgagggtgtgctggcgggtgctaggcagggcgatggaagaggttgccagttcggagccgcctcaagagctccagccacagcaactgccgctcccgatgggtgcccttcatgaagctgctgttctccagggcacggcgggacaagtagggcagcacctccatcacggggccatagggcacgtacttgtacacggggtagccggcctggcccagcgggaagctgatctggtcacacatgcctagcagctgtccaaagtacacctggtggtcagcaggatgcaggcccagctcctccatcctgcgcagtgcgaagcgcactgtgtcctcattgtgggaggccaccatcaccttggccttggcgttgtgcttcagctcctccaacacgtagtccaggcacctgtggtacatggcgttggtggcctcgtacgtggggttgatggggtcctcatagccgatctctgccgcacgggctcgctcctgggccaggtatgcgccccgcaccagcttggccccaaaacaccagccctcacggcgagccagctccacgtccagggtcacattgtcataggcatccttgaggtagcactggtatgtgttgaagatgagcggcttctccacattgaacttc

SEQ ID NO: 483436 - DNA, 1000 bp, Homo Sapiens; identical to SEQ ID NO: 120119

SEQ ID NO: 483437 - DNA, 1000 bp, Homo Sapiens
aattagagagacaacaagaagaataagggaaaatgggaagaatagagtgaaattaaagcaaatcttggattcagattccattaaacaggaagtttccttaaaaaaaatcaaacgcttatagcaatgctgagaatttcataggtacttcatgggatctaacaagtgaagatttttctaaattgctttgtggagactaagtgctttaaattatgtattattaacttaacagacactttacatcatgagttagccaaacattcatgtttcaattgacaagggaaagaaagtgaagagatgcttgctgaaggcacaagtttgaatacagaaagctggaatataaaaaactattgacttccaatagttttcatttatcagattactacactattgtaaaaattatcttcttaagacataaattttgtattggttaaagatgtcctgaaaaaattctgtacctccttggctttcactgaagttttggggcagttcttcattaatttgggttatattttaagtccttaggaaaagacagaggccaatttagacagaaagagaaagacgacaaaaaggagaccagagagaaaagacagctggtactataacctcagatttttgactcaaatatcatatcactaaatttgatggcaatcacttcctaaagagaaacagattcagaaacattgcagatcaccaaggtatccttctttgctattccagaataggtctgttacaagaaacccagccaccaaccaaacaaccccaaacaaataaaaataaacataaatccccacacctcttttgacttggtctactcaactctttcatacctccaaaaataaaaatgcaaacctcaataatgtatttacaggtagcatggcttattataaaatctccttttgcatttagaagttcaagatactaactcccctaacttacagcatgcggagagagggtgggtggaagaaagcaaaactacaaaaacagaagggcagtttggggg

SEQ ID NO: 483438 - DNA, 1000 bp, Homo Sapiens
gagggtttttctccagtatgaattatctcatgtttagtaagggttgaggatgaaataaaggctttgccacatttatcacacttgtatggtttctctccagtatgaattttcttatgtgaaaaaagggttgcagggtggttaaaagctttgccacattctctacatctgtagggtttctctccagtatgaattatcttatgtgtagtaaggttacaggactgcttataggctttgccacattcttcacatttgtagggtttctctccagtatgaattttcttatgtgtagtaaggtgtgaggactgcttataggctttaccacattcttcacatttatagcgtttctctccagcatcaattttcttatatgtagtacgggttgaagactggttaaaagttttcccatattctatacatttaaaagatttttttccagtatctcttatcttatgtttgtttgaatttgaaaatttatgcaagaatttcacatattcatcacattgaaatatttttctctgggtagttgccaaacattgtttaagtccattataacctcttttgtgcactggacactcatctacactttcacagcctttttttaactgtaaattgtcatgtctacatttttcatatcttcttagtatcactttttggaaagaatcttttatgctctgctctgaccaaaggtcttgggcaaaatgagaatacataactgaaagaaacaataaaaacacatgacttcaattgctagactcagataaatatacttcacaaatctaacctataaaattatacaaactacgtaagcaagatgacacagcaaaataccacaagctgtaatttcttcctggatatataactgtaacaaaaacatactgaccaaaatacatttgtaaaaaatttataaattagttaagtgtgtaaagggctccaggtgagcacaatgcaaagagccacatagaaaaatagaaaaaaagaaaagtctgttacttatacccaa

SEQ ID NO: 483439 - DNA, 1000 bp, Homo Sapiens
gagacagagtctcactctgtcacccaggctaaagtgttgtggcataatctcagctcaatgcaacctccacctcccaggttcaagtgattctcctgcctcagactcccaggtagctgggactacaggcatgcaccatcacacctggctaatttttgaatttttagtagagatgtggtttcgccatgttggccaggctggtcttgaactcctgacctcaggtgatccacccgccttggcctcccaaagtgctgggattccatgcgtgagccaccgcgcctagcgtcctacccgtactttcaaattaaggatcctaaaacacttctggagagaaacacacacacacacacacacacacacacacacacacacacacacacacacactagaaaatctggtcattaaaattacttgtaagctttacttcccttgagatcagaaagagtaagaaagggatcaaagacaaatcctagaagatgaaatgacattttaaaatatcatccctttctttacaaattgaatataagctctgaagcatctagaccaaggcaagctgatctcttgtggctgtaagcaactttaacatatacttgacaggacagagacaccagcctttcatcttgtaatctcactcattacagcatcagtgagtgccagttatcagggcaagggccacagacatgtggcttctaagctctacaaaagagataaaatacacggtgtatcaatgccttatttggctaattacaaagaaagcaatgtaataagtatgttacctataaaatgtaattattgaggaattgtaaaaaacaaaaaagcctaattacctggtcagaaattcaacaacagcatcacccaggaattccaaccgttcattgtggttaatcctcgagggagttgggtcatcttggccaaggcgtgacatgatatttatcaaggtgttaatccctttcttccgcatgtgcatgtgatgaacttttctgtctccgtatttgggctgccg

SEQ ID NO: 483440 - DNA, 1000 bp, Homo Sapiens
cattttaacaggccactttaatattaatacatgtgtaataggattggaactgaaaatcagctagagatggtacattttacattattgggaaaattacagttctgtattgtaaaaacatttattttttaacaatgtacctacattaatcaaaaaattacagcatatttaataattttacaaattcttcataaaaaatatatctctgtacaaaaaggtctttcgcacctacgtcgtgacagcagcgtgtggtgggacgggagggagggtcggcgatgacaatgggttttcctgatcataatgccagcgttcttttttttaccccctttttataatagctttttgttgttgtttacaaaatattttacagaagaaaaaaattattgcagctagcctgaaaaaaggcaagatgtgtgtgtaaaacaagcagcagttttaaacagctctgaagcacgtgtcctctgttagtgtgtggtcgcgtccctcacgcgtgttcccgttgccttcagggaagagtcttctagacctaactcagcaagcacagctcctgactgccctaaaatgagatcctccaacaccttgcggagacgccgttcaacactgcacacaaccttaggaagaaactaggcagaattctcacacgagaatttcactgattttttttttcatttaaataacatgcttcaaactggcaaccctaggacagtttgactttgcacacaaaggaaaatcatatctaatttgatatgtggtttcttgtatgtatgtatgtcctgtcatttcaggatttcatagcatcgttgaccagggagcaggtcagggatatgggaacagagatgttaattcagactctgaagtcagcattttgcacctagtttgaatgactcaaacttagatatgtacaatatatatatatatatatgtatgtatatatatacactaatatgtatagtaaccctgttctcccttgcacacgagcctcctcacactttcaatcatcttc

SEQ ID NO: 483441 - DNA, 1000 bp, Homo Sapiens
gacaaaattttaaaatcctttatttgtgctgataaagcatgttaaatacattaaatctatttacactgtacaaagcttttaaagttctaaaaatcagatttttatctaaatgaataaatttctctgtattgttaaaaccattctacttaactgcattgttctccaagtccctccagccaggaggcacggtaacaatgtgtcagatctccacactgagacaccaccttcccaagatcatggtacatcagcagcagaactgagacaaaaactggaacaaggaccaccttgctcctactgcattatagcttttgatagtatttgctacttgaagaggaggctataccttgtctagctcaatacagtttatgtttcagacactataagtatgatacccaaatgcttcatgagtgaacaaggtcagcagatcaccctgagaacaaggaagacacaatttccttataggctaatgattataaaaatagaaattaagagctccccagaaacaaaccacttagtcaaaaaggaaggagttttgactttcttctaagccaagtactcaagtttaagacttattggcctatttaaaaattctttctatgacttctaaacaatgatggcaaagtgacaaaaataatgtaatcatcttcttccctcattatatataaaccaaactaaaaacaaaagaaatgaacaagctataatccaaaaaaaactagaaaatcctgacaggaatcatatagaacatctctaagaaaaggattcttggcttaagcaaaatattagagcagagaaagcaaaactcatgtcctctcatgcagtccggcaaggcccccctgcccagaaccctcctctctgagtcacatggatgagcagacagaagatctggacacagctatccatgttaagcatgagagagatgtaaagaaatagcagggtaggagggcaggcatactacagaaaaatgagagagaggaaaagagcatgccagagaatacaaatc

SEQ ID NO: 483442 - DNA, 1000 bp, Homo Sapiens; identical to SEQ ID NO: 309699

SEQ ID NO: 483443 - DNA, 1000 bp, Homo Sapiens
agtagagacggggtttcactgtgttagccaggatgattgtgaactcctgacctcgtgaactgccctcctcggcctcccaaagtgctggaattacaggcttgagccactgtgcccggcctaataaatcttaatgatggcttttcttctgtgaaaacacctgaccactgacccaccaaatctcccacaggaaaagtaaactttgaagttacttttgtcttgttccctcttcctggttgctagtttaatgtaatgtttttgcaatagctagactgctgtaatatactgtcagtgtttttccaattaaatagaaacagagctatataattattttttttgacacagggtttcattctgtcacccaggctggagtgcagtggtgcaatgacagctcactgtagcctcaacctcctgggctcaagcagtcctctcacctcagcctcctaagtagctggaactacatgcgcatgccaccatgcccgggtgtgtgtgtgtgtgtgtgtgttcaagcagtcctctcacctcagcctcctaagtagctgtgtgtgtgtgtgtgtgtgtgcgtgcgcgcgcgcacgcactcaagcagtcctctcacctcagcctcctaagtagctggaactacatgcgcatgccaccatgcccggggtgggggtggggtggggtgtgtgtgtgtgtgtgtgtgtgtgtgtgtgtgtgtgtgtacagggtctcattatgttgagcaggctggtcttgaactcccgggctcaagtgatcctcctgccttagtgctgagatcgcaggcattgagccatggcaccaagccagggctatataattctaatatttttaaataattgtggctgggcacagtggctcatgcctacgatcccagcactttgggaggccgagacagggggaactgcttgagcccaggagttccagcctgggcaatgtagcgatatcccatctctacaagaaaaataaaaaactagctgggcatggtggcacacaccagcag

SEQ ID NO: 483444 - DNA, 1000 bp, Homo Sapiens
actgagaaaaagtgaatttttaattatcttgtgaatctacttagaaaaacacacacaagcaatgttcacaactataaatttaaaccttttgcactaaaaaaacacaaaacaacaaacacaaaaccacaggcatgaactgtaaacctgtattaactatgaactggtcttaaggttaattcttagcagtcattcagtattttcctccttggcaactgtaatgttttagcaccggatgatctcccgcagaggtactagtaatgactggctgccagtgtagggagatgcttccatatacaccacttcacacacataccgtccactctcacacccacccagacgggaggcacatggagatggggccacacgccgactctcagggtaacggaagtagggcagggggcgcataggttgcacatctttaatgtagtgcattcgtagaaaaaaggccagctttcgctcccaggcgtgctctcgtcctcagactttaatttcatgatttagaagatgcagacgttattgcctaaatattattctatacatttccatcagtgttcaggaaaacactttaattgctacttaatttacatcataatcactgggttacagctttagctcattggcaattttggaagcaatatttttgaaggctatggatgtccccgatatccgcttaaaccggaccccgttcagagacagtcttggcagcttgcacacttccatttcccactgcacgaggttctccgcgtgcccatctccgtggacgcagaagagcaagaagcgctccctctgctcatagtcgcagttattggcgtccaacactttgcggatttcccgcatcatgtccccgggatccattgaactagtggttttcatgctccaggtgaagcgtagggatcgaggctttgcttctttgttttcatctttttgctcagcagatacattgcgactccttgtgagttttgaagttaatttactaaagagattagtggagcctcggctt

SEQ ID NO: 483445 - DNA, 1000 bp, Homo Sapiens
acaatttttaaatgcactgcattttattacataaaagtacaataagtaaaatatacgaatttagtttaatatacttttatcaataattatttcttgcactataatgtagaaaagtattactctgacctaccttatacattacttcatataggttaactacaaagagcctctccacttatattttcatcatgcatcttacattttaatgtccttacttttatagaaaaggtcataaatgcccaattaataaaaaactatctctaatatctctgatgcagcaaaaattgatcacatgctttcacatgtgaatacaataagaataaaataacagcataaagtaatttgaaagctgtattatgtcattacccacttttcagaaaaatttttttaaggaaacaaatacacttttttttttttgagatggagtcttgctctgttgcccaggctggacaatggtgcaacctcggctcactgcaacctccacctcccaggttcaagcaattccaattctctgcctcagcctcccaagcagctgggattatacgcgccggccaccatgcatggctaatttttgtatttttagtacagacagggtttcaccatcttggccaagatggtcttgaactcctgacctcgtgatccacctgccttggcctcccaaagtgttgggattacaggcatgagccaccacacgcagctggaacaagtatacttttaatgtaattacaatgcttccaaaaatctgcttttaaagttatacacaaataaattttttttttttctggagacagagtttcactcttattgcccaggctggagtgcaatgatctcgactcaccacaacctctgcctccagggttcaagcctcctgagtagctgggattacaggcatgtgccaccatgcatggctaattttatattttcagtagagactgggtttctccgttttggtcagtctgatctcaaactcccgacatcaggtgatcctcccaccttggcc

SEQ ID NO: 483446 - DNA, 1000 bp, Homo Sapiens
gagttccaaccccaaaaatattccaggacaagatagggggcaggctgggctggttcttcttcaatgggcttttgccgccaaggaggacagtggacttggcccacatccaggctacccccagcccgcttctcccctgcttagcccagggaggagacagtagaggtgatgggggcagccgggagggaggggccaaggcagtgatgctttcgggtaagaagttgggctgaggctgggggcacagggaggagctgcccaggtgcagttaccattgctcagtgacagagcctcaaagcttggccagggctgaaggtaccacacgggtgtgggtgaggcaggctaagcgggatggctgcagccaaggagctgggggagggccgggctcagggctagccctctccgctctaactgatgatctgccgaggtcgtccgtagcctgtcatgccggcctgggaggcccctctgttgctgcccatctgaaggccaatgacatgctttccctcctgcagctggctctctgtgaattccctcttatgctcctgcgctttcctagaagaggaggaaccaggataaagacttggtagaactgtgtgttttccacccgttttctgatccctctgttacgtcctagcccaatcccattgccttcctgttgcactttttttccctaatctagcttgcctcataggctagggagactgagcgcaggagggtggaaagggaggggtcaaggagtattaaggacccattattccccatcccagaccctcactttatcctttcttggctatctgcttcccctaatccttcccgcaagctccttagaacaagccacctcccaccccatgcggagacccaagctccctgggggccacatacttcataaaccagttgggatctccacggtagtgcccatcattcttggtcactgccaagctgcccaaagccatcagggtcctctgcactgctgccatgtctttgccttcaaagaggtcaacagtct

SEQ ID NO: 483447 - DNA, 1000 bp, Homo Sapiens
gactcacaggctttatttacatttgtctacagtatcatttccttatgaaatgaactagtacagcttagttaaaccaaatgaaatcataatcatcagaattgtctgtaaactactattagctaaattataaccttgcatttgcttagtacagccaaagttttaaatacagaaagcacaagaataaaccaatggtaacatgtagaatctagatcgtcggggcaatttagaaggtagactttcaaaaagtctgaggcacaattacaagtgagtaaaagttcttgtgcaacctacataaacgcagcaaagaaacttaagacataaaaacatgggaaagctcactgtaaaaatattatcaaaatatttctacataagatattttgctttcatttttagatcagctgaagagaaaaacattcactttaaagtaaaaacatatatttttgtttggtttgtctatgaaatatcttaaaatgtcgtaatttttatttaaattgcagcagacaatgttacggaaaaaaaacaagaaatcaatatcccataacaaaaagcccccaagcacaactgttgatttcctttgatatacttaccttgcattgtcactggaaatactgttaagagaaacctttttattttttaaaccagaaaacaaactaaagctcatgtgaccagattttaattttgagaaataaactccaaaagcattttaagccataacttatttcaaatgaataggaaaaataatgacttttgcttacatcatgcagcaataagcattcatttgttattcagaagaaaattgtatgcagtgtgtttatagttaacatcttgaggcaaatgttcacttaaattcacaatgtctccattggcctttcaccaaaagagaaatatactttaaaagcttacttcaatttgctcattaagtatgatttagccttttctaccatattatatttggtaactacatttggaagaatatcacacaaagcttcttaaaacattg

SEQ ID NO: 483448 - DNA, 1000 bp, Homo Sapiens
aaaatatagaactttattttggttactgaggtttttgttactgttggttcacagaaaagtcatttcttagaaaatagtaacggcagcattttttacagcgactcacattggggccaccaaacaagtgcaaaggacagtgccagggatagaagaggccagtactcttgtgcccagtgttctcagggagaacccagtgctcctggctccctctaccccctcccatcccacccaacagagcagcacctagggccaatagaaccagccacgcagccaagtgcacgacagtgaccccagcaggctggtgaaggccccacaggaaaggccgagtgggaggggattgttcaggttgagctggccctgcatccagccctcttcctcaggcagtggggtctgacctcacctggctttgggacttggacatattcacagtacggttcagtaaagtcctctgggagctggccttcctctcctcactcaggccactaatcctaccccaaccccaggctggatctggggacacacagtcagaagtggccctacctacggggagcacacaggtgagtggggggtcaggcaatggacccagatagctccaggacaaggcagaaagtgctcagtaccctgagagggagcagagaaaggccactgaggcccagagggggaaagagggcagggagagctatgtggaggtggcagtgtctcggctaaaccttgaggaacgaggacacggagatgggggagaagggcatgccgggaggaggaaagagcatgagccaaggcacagagtggggaggcttgggagggtcagtaaagaccagcgctcatccatgagaacacagatgcgaacgagaggcccaggtaccctcatctgaacaggctgatgctcaggaggggcggctggtgtgggcacgctcacatggggtttgaatccttctgcatttgggagctctctggggatggagtagagccttgtgcatccctgcccacccagcctagcatc

SEQ ID NO: 483449 - DNA, 1000 bp, Homo Sapiens
ccgataatgactttattttaacatatttaattacagacataaaatagctggggaggggggtgagccccagcctagccccaccatggggctataggaggggaggcgcaggcggggcccccctgctgaccctctctctgggggtcttcctatggcggggccctattgcttgagtgggggaggagccatgcaaatgaggggggcagggcagccactcggccccaccccaccccgaggacggcctccccacagaatgcccaggctgtgcccccagccccagctgctccacctccttcctctctgtccagggagcagaccctctggccagcccctgactctgcccctaccccctctgcaaacctaaaggggaataaatacaaactttacaaagtaaaagggggtccaacattgccctggggcggggcctgctctgcccctagcccagggcctgggtccggtgggattggaggggccctgggatgcaggccgccccgcccgtcacctcacatcattcctagctgcagcagcgtgttggcataggccatgggcttgacgttgggatgaggctgtgggaccagggcaggtgggatggacagaagtcagaacagagcccctgagcacccaccggcagaacctacccccgccccttaccagggtctcagcctccttgtccccaggccgggatggaaggggcaggggccctgaggggtgactcaccactgctgtgaactggtggaactgaggccgtaggtcagagccctggaggtggatgtaggaggctttgttccccatctggtcgcagtagttgggggcagagaagacggtgacacagcggcctccgtgagccacctcgtagccctcggccttgacttcgtggctgcggatgatatagtccaggttgttctcttccaagaaggccttggtgacgtcaggcccaaactgacagctcacgccccgcttgctgatcgagcgcccgttctgtggctgtggatctgaccagagc

SEQ ID NO: 483450 - DNA, 1000 bp, Homo Sapiens
gagatggagtctcgctctgtcacccaggctggagtgcagtggcatgatttcagctcattgcaaccttcgcctcctgggttcaagtgattctcctacctcagcctcccgagtcgctaggattacaggtgtgcgccacacgcctggctaatttttgtatttttagtagagatggggtttcaccatgttggtcaggctggtctcgaactcatgacctcgtgatctgcccaccttggcctcccaaagtgctgggattacaggcatgagccaccgtgctcggccagaaggtcaaacttctaactgtggccccctcctccctcatatccagactcaagtttcttcccttcctgatgtgctgtgctctccagctctcttgccctgctaagcctaggctgattcctctgcctggaactccctctccctcctttagcctgaacttgttcagatcccagcttagtttgcacttttttcagatggggggcccagacctgcagcctgggtcaggcatctcccctgggcttcccccatcacagtgctgcccacctgggtcatcactgcccatttagaatggtctcacctgctgggccctgaactgccagaagacagggctatgtctggctcctctggcttgactaaatgccccccttacttcccccacccgcctccctggaccctctctggccttgctgagcagattctggtgaaacggggcaggtgggagaggcggcgtttctcaccgtggggccccgagcaggggttaggactttttggtttttaccagccccttctggaccagacagcggtagaattcctggatgtacgtgtacacgcacttccagtcaggctctcgaagccgcaccatgtcctctgtatccaggagctgcgggcagtccgcatgggtctccgcagatgagaaggccacctcgaagttctggcgtcggttctgagggctaagctgcccatagtcgaaggcctcagggaagaagttgtgcaccagggcaca

SEQ ID NO: 483451 - DNA, 1000 bp, Homo Sapiens; identical to SEQ ID NO: 309708

SEQ ID NO: 483452 - DNA, 1000 bp, Homo Sapiens; identical to SEQ ID NO: 309709

SEQ ID NO: 483453 - DNA, 1000 bp, Homo Sapiens
cactttttagaaaaagtttaataatagcaggttatcatcatatgtaaccataaaataaaaacaataagttaaaatcttctctcaagaaataagtatatgccacacataaaattcattacagaatcttttttgaaaacagacccctttctctgataaatcattgtttgaagggtgcaaatttcaaaaacccacattgtccacaaggcaaagcaaaaggtatcatcacagtatgagtcatttcttgttggcagacatctggaaaacctgtgacttacaagcagctcaaatctagccctaattaaatttacaggaacctttgctctttcaagaatagtcttgttggcatcatgctaggttgctaaaaagagtaatatgtgctctattcacagtaacattctctgtccagtgcttttgaatgaggataaccaaacaggttttcctgaaaaaaatcattaggaggcagattccaatgagaccaacgggaaacatttttaaaagcataaaagatcgcctcaggcatatgctgagggaataaaggtgcaatggatcactgatacactcctaccatgcctaagctactgagtccgagaactggaagagggtctccgggttattgctgtcggcaggattgctgggctgcagtgtcttggtgggtgtagttttaccgtgagaatgagaggaagaagaatgggaactctcactggaactgctgcgcgtctcggtactggtgctagtctttttcatttttcttctcttagccaaaggggccttatcaacattctgaaggcaaaacccctctctcttgtatttgttaaaggcctggcgggggaaaaaaagggaacccctgtgaaggtaaaagtactgaagctttcctagcagttatgacttacagcagaagacaactttccattggcaactgcagccccaagttgttttaagggaacaaagctcttaaaacctttatatctaagtctattggcagggtggagaagttcatggg

SEQ ID NO: 483454 - DNA, 1000 bp, Homo Sapiens
ctgagatagagtctcgctctgtcacccaggctgtagtgcagcgagactccgtctcaaaaaaaaaataaaaaactcaagaatcggtcgggcgcagtggctcatgcctgtaatcccagcactttgggaggccaaggcaggcggatcacctgagtttgggagtttgagatcagcctggccaacatggcgaaatcccatctctactaaaaataaaaaaaaaattagctgggtgtggtggcggtcacctgtaatcccagctactcaggaggctgaggcaagagaattgcttgaacccgggagctggaggttgcagtgaggcgagattgtgccattgcactccagcctgggcgacagaaataaaaataaaaataaaaataaaaataaattaaaaaattttaaaaaacctcaagaatcaattcaggcgtcacctcctcagggaagtcctccctgaccaccctcccccaggctggattagtgcctccgttaggcctcttcagtgccctgggctacctctaatttagcacatcttcctgtattttaagtatctgtgactgtgtccctaccttggagagttgcttgagggtcagattcatctctggatcctggattattcagcaagcacaagacaggcctagcacaaatgtgtgctcaactcatgtgtggggaattgaagacagaagtcagaggaggaataagaaatcagagaagtaggcaaaaactgcctccattcaacgccctggttctactcacctcatacaattccagggggtagttacaagcctcaaacttctggaggaggctgcagttgtcagcatcggccaccggcacattgtaatactcgccctcctcctggttcagtaacttgtaccagccatccacgggcgccttgagcagctccgagacgccaaaggacatggcccccatgaagtcgttgcgggaggtccggtcccagtcccacacctccacgctgagccggcgctccacatcccctggcttcaggttg

SEQ ID NO: 483455 - DNA, 1000 bp, Homo Sapiens
atttcatccaggttttatttcacctaattttgcatggaaatacatagaaataattctaaaacatgctaaacaattccccgccctggtaagaaaatatattaaatatagtcatgagttatttaacagggatacattctgagaaatgtgttagatgatttcattgtcatatgaacagtatacctacacacacctaggctatatggtagagcctattgctcctaggctacaaatctatacagcatgttactgtgctgagtactgtaggcaactgtatctaaacatagaaagatactcgtgtatccaaacaaagtattcatgtatctaaacatagatacagtaaaaatgcatatcataacctcatgaggtttgtcctgttatgtgccacatgactatattttaatacttaatgtttcagaaacagcattctaagagtgagtgaaatccaagcactttagaaggctgaggcaggcggatcacctgagatcaggagtttgagaccaacctggccaacatggcgaaaccccatctctactaaaaatacaaaaaaatgagccgggtgtggtggtaggcacctataatcccagcaactcatgaggctgaggcaagagaatcacttgaacctgcgggtcggaggttgcagtgagccgagattgcgcaactcactccagcctgggcaacagagcgaggctctgtctcaaaaaacaaaaaaaaaagtgagtgagtgagagagagagaaagagtgtgtgtgtgtgtgtgtgtgtgtgtgtgtgtgtaaaatgaaaggcttggtcggcatgatggctcacacctgtaatcccagcaccctgggaggccaatgcaggaggatgacttggggccaggaattcgagaccagcgtgggtaacttagatccagtctcctttccctttgtgcagctctgacttccaacccagtttctatagaaacaggaggacaagtgccagtgccagaagtctgccaattagaactcatctttgagttg

SEQ ID NO: 483456 - DNA, 1000 bp, Homo Sapiens; identical to SEQ ID NO: 309711

SEQ ID NO: 483457 - DNA, 1000 bp, Homo Sapiens
agatacagctataattttattacaaaaccgttcttttggcattagttggttacagtgatagcaagataatgtgagtgtgcagaccagctctgatggaacgactgtattccctgcttactgaaccaaacttcggctacctcacatccattacatacaagtgacctgcagttattactgctacaaatcttgacgcatgtaccactgagggaggagctgatgctaagggattagattatatgttgataagactacaaaagttcctttatgggactttttcttcctcctcccatccaatgactttgctttagaagaatcacattacttagagctagtctgagtagcagcagcacccaaggagcatcagttcttgttaaaaagcaatacctgtgtgatgcacttttacaccacaggcaaagggaaggaccactctcgtgtgaaactcctgcagggtcccttaataaaaaataaaagcattccatcaagttcttctggatggtgttattgctgtacatttgttggtgagtcattttctgtgctgtgtttgctttgaagggatcttccaatgtatctccaatattcctttcttatagtgtccttttctttagctaggatttcacataactctaatgctttattaagaatgtcttccttattgtcacactgattttctagcatgtcttcatagatatccacaagaaaggcaattaggtagggggaactatgacttggttgtaaatcaagtaattgatttaacagattaggatatttggaaagaccacgatcctgcaaaatccctttcaaatagttccatgcactttcattatgtggtactagtttaatcatttccagagtgtatctgcaagaaaaatatatatatacaattttaaaagaacagtgcaatgatgagacacagttttttttttttttctgaaacggagtcttgctctgtcacccaggctggagtgcagtggcacaatctcagctcactgcaacctccgcc

SEQ ID NO: 483458 - DNA, 1000 bp, Homo Sapiens; identical to SEQ ID NO: 309714

SEQ ID NO: 483459 - DNA, 1000 bp, Homo Sapiens
gggaaacaggtgccctattttactaaaaaccacatatacattacattttacaaaacagcaactatctgatctctcggtcccttccttaaccccataaaaagaaggggatatttggggaccgacgggaacaggttcccctccaaatgctgagggctacccaggcatctccagactcctggtccagtgcagggcagggggcagcggagcccgctcactgctcccatcagcccagggttcctggagcccgtccagagccctcagtgcctaaccagggctggagggaccacctgggtgggcctcagctggactcacagcagctccctgcctgggcggggtccggcctcaggaggaggagtgcgggtatccatagtggttgtggtcagcctcgcccagggtcaacgtcagtgacaggctgggcttccgttccagctcctcctccttcagacagtgctgtgggggtcgggctttgaagaagtctgagatgtagcagacagtgagggcagccaccagtgccccctgcaggaggccaacaaggacatcgctccagtggtgtttgtaatcagacacgcgggtgtagcccacgtagagggcaaaggccaccaggaagaactggactgtgggtcgcagcagccgtgcccacttccaacagagtcgtgcctgcacatacagcaccaagaacaccatgcagtacatcccaaaggaagagtgtcccgagtagaaagacaacctgaggaaggagaaggggcaggtggctcactcagcgccttccaacctcccccttgtccccgccccgcccacagaagggagggctcgacacggaggctgctgctgttagatgcactcaaatcccagtagcagaaactgttccccttttctgttccagtcatctgataatggaataagagtctctgactggggctgtggcatgagatgcctcatccgtgaagactctgaggcctgaacccaaaacccagggcagacaatcatgtctggcaagcag

SEQ ID NO: 483460 - DNA, 1000 bp, Homo Sapiens
cgcgatctagatgttgcttttaaaattatgacatgtaccataatattttgcatgcttttcattgcttttaaaaagatgattattgttttgtgcttttaggctaaatttatgtaggaaagcatttccctatgtctgtcttctgccatcctttttcttttcctgcatgctctgttttcaagaagctagaaagagttctaaaaaataaatctgaaaatgaccatatgacatccagtgaataggcccaacaaaacttccaggaattttaggggaagataacaaatggaactcctacaacaaggaagactcaggtgagagctttctaaattgctttcagaaggcagccatagcaccatccagggatttcatcttgggggagaattggttgctttgctcaaccttgaaccatgcccagctatgttaccatatatgcctttggccccaaagtggtacctggcaagaggtgtgcctgaatgaatagagtcatccccactgttgggggaaaaacagcaacaatgccaccaaaaacaacttcaactacaaaaacaactgtaaaatatactcctcacccttaggccttcttggcagacatcgatcatcttctcctcttctatgaacacataacagcaaataggcatgacctgtccccatatactgggccttatttcatataatgaaggtcattcattcatccattcattttttgttcatttgctttttcattaaacattgagtcagatgctgtgctagataggtgctggggtacaaaggtgaaaaagtcccagtccctggccttaaagaactgaagctctagtcagggacacagataagttattcaatgattagagtttagtgtgataagtgtaatatgtaggagtgagaactgaggagaggcaattattcaagactgaaggaaggggtggttagggaaggcttcctggaggagaggattattgaactgaggtgagtcttaaaggaggcatagaactagccattaaggagt

SEQ ID NO: 483461 - DNA, 1000 bp, Homo Sapiens
ctcagtcaatttaggaagtttattttaccaaagttagggatgcatgcctgtgacacggcctcaggaggtcctgatgacctgtgcccagggtggcagggtggtcagagcacaggttggttttatgctttttagggagacatgagacacaaatcaacatatgtaagatgaacattggttcgatctggaaaggtgggacaactcaaagcaatgatgagacaacttgaagcaggggggtttgcttcaaggtcataagtagataaaagacaaatggttgtattcttttgagtttccgattagcctttccaaaggaggcaatcagatatgcatttatctgagtaagaagaaggatgactgaattattttcagatatttattttacaaaatcagatatgcatttatctcagtgagcagagggatgactttgaattgatttattttcaaagatttatttataaaaagatttattttcctttcacaatgttaatgccataaatagtaatttcttagatctactaattttagtgttaaaaataggttccaatagtgattataaaaaattaacatgaaatattttatggggaaatttcagggttagtattggttgtatgtaggaaagcttgtttgtatttatatatgtttttaacctaacatcttaatgcattttgttactaatccttatggttttgtagaaaactctctaagaacttcctagattatgtcatctgccagttacagtgatttttgactccttgctccagttttttataccctcattttttttcttgaattatatcaggagctttgatcttactttgaacagcctcagcagtgagagtgcacccctgccctcacccagagttttacaaagaggatatctggtataattttaccttatagggaaaagctgaccatggaggagcccgattcatctagtgtactgtccacctcaggacaagaagaaggggcaccactctggctggagacctgccctcagcctgcc

SEQ ID NO: 483462 - DNA, 1000 bp, Homo Sapiens
gcataaaatactgtttattttgtcctttaggaagactaaagtagtccagctcccctacagcccagtcttgcccccaccctgcactctgtcgccttagttcctggggaccaagcatctggcatttctcaagcagaccctctccttgttgctccttttcagtccctggagtctggcttcccaaagccaaagctggaggagagctcattgctgaggaagcagggttggagcctgaggagatgcagagggcctggacccctcgctggatcccagaggcccaggggcagagatgctgggacagggctctaggggaccactgggtgactcttgaggggctagaagcagggctgggtgacttttgctacggtgggctgcaacactgtctggcttctcaaagcgcttgccgcagaattcacaggggaagcgcaaggcagccaccgtctctgcatgcttgcgctggtgccagttcagggaagccttctggcggcaggtaaacccgcatatctcacactgcaggggtttttctccagtgtggatacgtctgtggatgacaaggttgctgctagtgcggaaagaccgggcgcagaactcacagatgtagtcccgggtgtcactgtgcagcttcatgtgctccttcaggtgtttcttaaagttgaaagacttcccacaggctggctctgggcaggagaaagacttctggtggatgtgctggtactttttgtggtgattcaaatactgccggttggagaagatccttccacagccagggaagtcacaaggcatcagctctcttttggcagctttcctaattctcttggggccaatttgtgcagtgtcctcatcccaggccggggttggagcagactgggcctgactcccagtgctacgggcagcaaagagggagcagagggcctcgagggagggccacatcccaggacgcccctgccctttctgtctcagccatcaggttacctggccagggcctcagtctgctgggccgctt

SEQ ID NO: 483463 - DNA, 1000 bp, Homo Sapiens
agagccaaccaaatctttattagtctcggcagcagaactaatggagcccccatttacaggggagctttagtgggctagtctggctaccaggcagggatgttagcatttctattggtgattgggatagaaagggggaagagactggaagggaaccaaagggggagactggtggaccacctgagggcaggcacagatggggcttcctgggctggtgtagaggtggatcaggccccagaggagaacactgccatcttattcagaatgaaggatgagacaaagcctgagagggtgacagtcacagctacaaagagagggccgagctcctggtgtgagaggcatttctggacggaggcagctttctagggctggaagtctcaaatagaactcacctgttccccaaccaggggtccccaggttcagctcaattgttatcatgggtaccagccaggaagctgtttgtgggaaggatgggacttaactcaggagtgttttaggtatggacatgtgtcagtattcacaaaacaggcaatatattcattatagatgcaatcatgaaacttccctccagagaaggctcacatctcccctttcacctaggaagctccttagcttgaaggcccaccacggtctgatcccagcctccaccccagcccaaatgaactcccatttaattccttggacatgccatgacgttcacggctctgcatacttgccaataactgttcttccagcctacctgtcttgctccctgccccacctgtccttgtcaaaggactgataactcttcagctttgtcaagtccttgtttactcctgttctccccaccaggactcgagctccctaaggagagagcagagagcccgattcatgttgtgtctacagcgcctggggaactcgaagccaaatgaagtcgtatttgctgtgccctgttgtgtttagaggaaatgtatccataaatgtctataacagattttgggggtgtctagtggtagatgtgaag

SEQ ID NO: 483464 - DNA, 1000 bp, Homo Sapiens
gaagaagtagctcaactttatttcagtaaaatcaccaacaaaacaataaaaagccaaaactaaaaagacagttttaattgtgagctgaagttttatatttctttacgaattccatttaaaaaagagaaatctctaaaatcatcaatacgcaggtctttaatccacttttaagtctttccccaccagcattgcagtcacgggatgcatgcttgctttgtgctcttggtaggttcggacagcttgatcatgggatttgtcaaaggcagcaagatccttgaataagggccgggtaaacttcattcttccttgttcagttgccatctttagcgccaaaggaattgcgtcctcccacttggattgaatgcagagccgcagccatctgaatcgtatttcagaattgttaatggcattgaagttgtacacctcttgcattcgctttatgtgccccaatggaagaggtgccctctggagcgtctgtgctaaaaactcattcaattgatgagaagagagatccttcaggtctgtggcattgaatgaatttaaatcatcttctttggcagtaatccatctttgacttaaggcaatacaagcatttgtcagagtcatatcataactgcaaagataaagattacattgtttaaaaatgcacgtgcttttgcagaaatgcagttttaaagctacagtacatacttaaatttcaaagtcccttttaaataaggaaaacaaactccaaagtgaggaaaataggaaatattttacctaacttacatactactggcatcatccaagaactcacaaacccaaatggataccacattaatgaaacacccatctatcttttagaaagaatgccaaagcacctcagcaaaagactgtcatgtgctcgagtagtatatgctaaagtagttggaatcagttgagcatatttagtacatggcaggaacagttctaggcactcaagacaacaagatgaacaacatcaagtccttgctgtcatgga

SEQ ID NO: 483465 - DNA, 1000 bp, Homo Sapiens; identical to SEQ ID NO: 309715

SEQ ID NO: 483466 - DNA, 1000 bp, Homo Sapiens; identical to SEQ ID NO: 309718

SEQ ID NO: 483467 - DNA, 1000 bp, Homo Sapiens
cagctctttcactgggtacccaggctgtattttaataaatttttgtgaaatcaacagcatatatattattaaagcaagtattttctgtccctagtctgtggtccagggaatgagcaataagatacaaatgaacggttgacaccataccataaagattaggaataagcatatcataaagattagcaataagttggatcatgattttacagtgagctcggttttagtaagccataaaaaggattttatggtgaaacataagcttaatataatctctttatcatgttccccctaataactgttcattactgcttcagttcattttgtttacacttgtcacatacatctctacagtacacagacacagacttatattttctatacattttttagcattgagttgcctttggatcaatatagaattagtagggatcagtgcaggaaataatattacctttttctgaaagtagagtcttacttatgtatatagcacctttgatttaaggatctcaaggtactttaacattcactgtagcatacttctaatatctctgggtagggaaactattataaattatcattattgcctttttatagaaggaaaaaataaaagcaaagaaaagcgaagtgctcagtgagatgacagtcacagcagaaactcgggttttcagctcagcattctactttgtgaactgtaactctgtaatatattccatatcaaaaggtataatggtttcctccatttgtataacatctctctgtggatgatgttaaataaaagggcaggaatgacggtaaattcccaccaacggatcctcctggctgtgcagttatttcctgcagttctttatgttggctaaggagtcccataaattacagaactgtcctgtgcttctccactgaaaatcctaatcgaccgctaccaccccagcatttccagcaggagggaaaaaccagtgatccacagtcatgctcttcagctgggcatttgtggccagtaaag

SEQ ID NO: 483468 - DNA, 1000 bp, Homo Sapiens
aaaatattgcaagagatttattctcagccagatatgagtgcccagtggcttgtgacacagccccgagatcctgtgaacatgtgccgaagtggttgggctccagcttctttttatactttatatttattgagatgttttaactctgcaggccagagagagagacctatctgaaaccagcttgggcagctggagaagaatgagggtgagcagacatctgggcaagccggagtttgggaaaactgccatcttcgacctttctggagcagcaagatactggtgtgagtctgtcaggagcttcagcctagctgatgaatagacaggagagagcgatgggctctacagacccgctcagcagttctttccaacttggagtgctctggtcatttgcatctgaatcctgctgtgtcttctctccagtggagattttcaaaccaggctgccatcagcacccactcaccaccctaagtttggtaaatgatatataaagcttcaaactggcccagcatgtaagaatgttcttctccatcgcaattcttcttgaagtttctcttttacttgaagttcttcctctttttgcacacgttctttctccagttcctttagagcaatttctcttgtttcccgttcaaactccttttcccctgacagaatctttttttccttttggagtttgttgatccaatagatgcatacggcaatgggtatcatcagaataaccacaatgataggcagggccactgcacagggagacacactgggcataaaggattctggaataaaaatgacactttctttcttctggccgagcagggtgttgttgatagagcaggacatgttcctcacagacttgtctctgatgatcacagccgtggtgaccatgaagaggccgtctgcatcaggcatggagacctctttcagggcaggcgcaaccccaccgtaggggtccctccacactgtgaggggctttgggtaccaccctctagatatgcactccagccgg

SEQ ID NO: 483469 - DNA, 1000 bp, Homo Sapiens
attccaacgggtttattcttacacacggcaccatacagagcagcacaggtcactgagccgggcccgccccttacaaaagagcaaggacagagaggccgagggcgcgaggagcacgcccggggcgggggcgtaagagaagcgggggcgaggaggtggacggtggggctgctggtcgggagcacagggcgcgacaaccgggagcgcaaagtccacaagtgagcgggcagatggcccgtctgcggcacagacaccacacggcacgtggcaccgagcgcgtcggcgtggcccaaggggcacagtggatggacagagagaggagagaggccagaagaggccctgcaccctgtcaagctcctggggcagagtccacccgaatgcggatcctaggaaatagggggaggccaaaaagagggggcaaggcaagcgcggcggcggcggcggcttccggagcaggagcaggaacggcagaggtccatgcaggaaggagcagaggaggggaggggcaggaaagcgccccccaggagcagccgggccgggcgggcttggactcccccgcccctctgggcctcgtcgcgctggccagcgccgggcgtggggccgagctgccttcttctccatgcagcgagcctgcagcgtccggccgggcctggtccccggcagcccccagcgcgggctccggcgctcctagccttccctgggggtggggttagttacaaaggttcccgtgggtctctggagtggggagctcggcggccgcttctcatctgagagcagtcccagggcccggcccgcctccggccccgcacagggggcatgtccagaggtgctgtgtgtcaccaactggtcttctaatttggaaggagttggaaaggcctttttgttgatgaaaagttggaaacagtggcacatatcgtgaagatgttggagcgccgcttggactgctttcggatgggtgtgggggtggaggaggcagcgatggtctcgatgcgcagctcccgct

SEQ ID NO: 483470 - DNA, 1000 bp, Homo Sapiens
gagacagggtctcactctgttgcccaggctggagtacagtgttgaaagcatggctcacaacttccctgggctcaggtaatctgacctcagcctcctaagtagctaggaccacaggcaaatgccctcatgcccagttaatttttgtattttttgtacagatggggtttcaccatgttgcccaggctggtctcaaactcttgggcttaagtaatcctctggccttggccttccaaagtgctgggattacaggtgtgagccactgtacccggctctaacttcttagatggaatgtttaatcattaatttttaggcttccttcttttctaatataagcattagtgctatagatttcccttgaagccccactttccctacatctcgtaagttttgtgatatatttcattttatcaattccaaggatttttaaatttccattttgattttgtttatggcctataaattatttagaaatagtttttaagtttccaaatgaatgggaatttaagatttatcttttgttattgatttctaactcaattgcattgtgttcaggaaacctggtctatgagattctaatctgcgtgatcttttaacttctgaagtcctctgggggtctaagtctgctatttgtgtttcagctgactctcactcatggtggtgtacatgctttgtgatctttgtggattcatatttctctatgtttaatctgtggggatcctgtccacattgtggatgctttcctctggagaggcttcatgtcagtttctgctgtgagccagtggcactactaacctgggatccctctagccccttcaggtgttctgccttaaggtagagactcagggttggcatcctgaatggaactactattaggttgatctatgtgaaaatgttgcttttttggggtcaaaccagttgaatatccacaattttatatggtccaacctacgctagcaacacttgcactcaggacaaaagcctgttcttcctgcttgcttac

SEQ ID NO: 483471 - DNA, 1000 bp, Homo Sapiens
aagagacatggtcttgctctgttgctcaggctggagtgcagtggtacaatcacagctcactgcagccctgcactcctgggccccagttatcctcctgcctcagccttctgagtagctgggactacaggcacatggctctgtgcccagatcttactttccagacctctgtgcaaataaattgaaaagttagatgaaattgataattttataagaaaaaagggtttaccaaaattgaccctgttagataaaaggtttaaaaaagactgatttccctagaagaaaaaaagaaaaacttatccaggaactacaccacaaaaaagtaccaatcccaggtggtttcatagaaaaattctgccaaatcttcaaagaacagatagctgcaatgctataaactggtcctgactttttttagagaaataaaatacacatataaatactaagtgtatagtcaacagtgtggctgctgtcttaaggctgccaatccaaaactcttaagtaatgaactttgttcaataacaaccagttttctaccacgcaagaccaacctcaaaatcacctagcccaggtcctaaaactttatgaatatcctctcctgacttctcccttgtgagatattactaagacacagtcaaagtgggttttctcttactgtaataagctaataaacagctttgtttgatcaacaggtttttctggcagtctatggagtagacatcagagagaaagaaaattcaacacagacaaggatcagagagtatctcagagaatagcagaaataggaatataagaagtgacagcagtttggggggaataatgagaaatttagttttactatgctagaagtaatgaagattgaaattctggagagccattcagaagtcatatccatagagatgactgctttaaatctgggggatgataaaagaaaactgtacagagaaaagtataatgtttcctatactaatcctataaataaggaatagaaatgattttactaacc

SEQ ID NO: 483472 - DNA, 1000 bp, Homo Sapiens
aatataaaacaatataatcacaataccagaatatggaactctacagtttatttcctatgggttactgcaggtatcaattttcctcgactgtgctattcacaactttgttaagtccaaaaatatgaaaccaaagtggtaggaaacttaagacttagcactttcactaaatggcatacatcgaagggcatcaattcaagagcaaaaatggttgaactcaccatacctacctatgtggtcattccagccttagagccgtccaggttactgagctccctgtaggaaaggccaggcctgaaagccaaggcgttttggatattctactgtgggccatgagtaaaaggggattttcaaagagaaaatttttttcagtcgagcaggaaggcctggtgccaggaggctttactgagaggaagcacttagatttaacaattatagacacaccattaggggagttaaaaatgtacagcagtgacatgttctactccaatcacttgtgctacggctaccaaacatgtacaaaagacttctcgggtagttccagctgtggccatagccagttaggaccttgagtgggacctagatctagatcgggagggcgatctggaagcagacctggatctagacttggaccgagatcgggtttttgaagctgactttgatctggagcgtgattctgatggaaggtttggtttcgatttggaattggatctcgacctggaccgggtctcctgattggtgccagcattctcactctctcctcgaccttccctctggctggattcagacttggcatgttcccgctcctttgacacggagcgggatggagatctggactgggagcggtcagtgtcttccttcttcttcttcttgctgctgcccgccttgctgtctcgcttgctgcctcgctttctgctcctctcactcttgctgcggctgcgactgcgactgcggctctcctctctgcttctcttcctgctcttcctcttgtccttgctcttgc

SEQ ID NO: 483473 - DNA, 1000 bp, Homo Sapiens
aatcttatcgtgatttttataaaaatccttgaccactcgctggccggagggtggagagggctgcagtgttattcctaacggaatgaaggacagctccagggactgggctagctcctggtccccagggaggcagcagcagacactatgttagggctgaaggcaatttgggggcctagctctgagcaagaggctgggagcagccacaccagccctgtccccacatgtggacagagggcccagcccactcaggggggaccccactggcttcctccagcctagtcctggagggagatcttcacaaagagggtggctgatggatgctggtccccgttcttagacatgaggtggacatggcggtatccttgcttgaggctgttcaaggggatggtactctggccaatgaagtcattcttggaggaggcatcataatcttccaccaagaagcggatgagggcaaggtcaggcacaactacctcaaacgcaaactccgtgtcccaccatgggttgaaaccattgttggtgatgacagcagtctggcggctggccacgtcccggctcacgccatggatctccactgtcactttggggtccacaattgaattcttattcttgttgacttttggcagctgctgccccgaaatgaccctgatgttgagccgcttccgtgcccaccagggcccctgagccagggcgcgggggttaaaggtgccgttggggtctcgcaggaaggcgggcttcagcacgtacccacaggccccgttgtcctggaagcggccctggtacacgtccatctctggcccaggtgtctggaaattcagggccacgatctggcagcccccattccacatctccacggggctgtagttggaggagtctgttctccatccagccgggtagattctgctcaggtgccccacgttgtggcggacaaagccgtttcctgattcttggagcagtcgaagggcacggttctcagagaaggacgccatctcgtagaagg

SEQ ID NO: 483474 - DNA, 1000 bp, Homo Sapiens
gcctccttccttcaacacagtatttgaagttctaggtacagcaattaggcaagaacaagaaataaaagacatccaaatttggaagaagtaaaatctgttagcaaatgacatgattgtatctagaaaatcctagatcccacacaccccccaaaaaactgttagaataaacaaattcagcaaaggatacaaaaccaatgcacaaaaatcagtattatgtgttttttacgaaatgaggtcttgttatgttgcccaggctggagtgcagtggctattcacaggagcaatcatagcatgctgaaatctcaaactcctgggcccaagcaatcctcctgtctcagcctcctgagtagctggaactacaggcatgtgacactgtgcctggcacttacacttttatatgccaacattgaacaatccaaaaaggaaactgagaaagatctacttacagtagtaccaaaaagagtaaaatacttaagaattaaacttaactgaggaagacttgcccagtgaaaactacaaaacatgctgaaagaaattaagacagataaataaatggaaagatattctggttaacagattggaagacttactgttaagacaatgctactcaaagggatctacagattcaatgcaatccctatcaaaatcccagagttttttgcaaaaatagaaaatttcatcctaaaattcacatggaatcttaaatgaccctgtacagacgaaacaatattgaaaaaagaataaaaaagttggaggtctcatacttcctaatcttgtaacttgctacaaagctacagtaactaaaagagtgtggtactggcataaagactgacatcgaccattggaaaagaataggccataaataaacattcgtgtatatagccagtgattttcaacaaggtaccaagatcactcaatggggaatgcagagtcttttcaacaaatggtgttggggaaactggatatccacatgcaaaagaatgaagttggacccttatct

SEQ ID NO: 483475 - DNA, 1000 bp, Homo Sapiens; identical to SEQ ID NO: 309725

SEQ ID NO: 483476 - DNA, 1000 bp, Homo Sapiens
agttcccatcttgatatagtcaagtttattgaaaaagtacaaatagaaatgtttcagaatgtcttaagttttatctacctagcaaataccaatttataattatgtaacagtgcagatctagaatgtgtacaggtactttgggagtaaccagaagagcatttcttgtcttcaaagagattaagcatgacaaatttgaatactgacttagataataggttttaattatatctaaaagtctatgttgatattgatcctctggcagttcctctactagactccagccaggggctcagaactgctgtctcactcttaatacattaccctatccattcatctggcaaattactttccaatagtttggcatgtgtatttatgacaaaggttgattacaaattctacactgagggagggttactaaaacaagacagaaaacaacctgtattaaatcatttaattcagaatagaaattacgattttaaatccggtagattataactttcattttgtaattggtacatatacttgcagactgctcttagctatggaagctgcttgggaaatagctgatcttccagttactcctgttttaatgcctcagtactatatttctttggggagaaaaaagttctaaaaagactgacccagttaatgaaccagagattttatattttggagggtaaagaaatgagttaagttttccaggtattaagaacatgggagggtggggaaaggcacttaatgcggttttgcaggaaatgggattactggattggagagataggttgcttgttagtaaacagatgttccttgtcagaaaggctgcaaaaaggactctaaaatcccagctttgagaaagacccacttttaagggacaagcaaagagtactgggaagtgtttgtgtagtaggagaaattctaaccataagaatgggactctaaaggagggaagggggaagcattccattcactagtcctgcaactgctcaacagcctacttgaa

SEQ ID NO: 483477 - DNA, 1000 bp, Homo Sapiens
aaaaaaaagacttctctggtgctatgtccaggctgataagagtctaaagtctctggtgactaacttttgttcttccccgagtaagaagacaccttcacaatttcatatcctgcttttaggcaaatagggagagggcagaggtgtttgtttgtttttaatctattttttttctcaattgtcttcaactcaaaatacttcttatgccaaagatggcatattctgctacccttcacttactacttacaacccagcctctatcatcataattagaacttctgaccctggggaacatgggcaatagtttgaactcttttatatctcccttaggcagagatggaggcccagccatgcctctgacatctagacacaactgttgcttcatttctcctattctcagaggtgatgttgtaggacttcaacaaatatcagtaaacattaattttttttttccttgaggcacagcatgatcttggcttactgcagctgctgcaggctcaagcaattctcctgccttggcctcacgagtagctgggttacaggcccctaccaccatgcccggctaatttttgtatttttagtagagacagggtttcaccatgttggccaggctggtgttgaactcctgacctcaagtgatccacctgcctcagcctcacatagttctgggattacaggcgtgagccaccatgcctggccatcaatttttatgtcaactctaaattataacatttagcaattttgtgactttttatggtcatcattaatgttgtttatgttttagttgtagtcctgtcattactcactcgggtatggtaatttggtctttttcaaaatgaagttaaggtctatttgctcttctctgaatcataataagaactgccaacagccatttcagcaataactatttactgagattttaaaatatttcaaggtaattggtcctagcagactggaaaataccaaattcttttccagaactgaatcccccatcaaagttcaa

SEQ ID NO: 483478 - DNA, 1000 bp, Homo Sapiens
caggtatatagcatttataggcatttcaaaatagtcactttgaaatgttgagcagattcatgatagattttcaaggctttgaattatttacattttaaaaagtttatcagatattgcaatgttaaagataaattatttgaacttctagtaggtagtaatggtgtcagagaatgacaggtaattaagtcatacagtacatcttgtgtccacatttcatgcaatttttgcagaatgctgtactatgtaaactgctactgcaaaaaaaaaaaaaaaagcaattattgcactgaattttccataaaatccctccaagtaaatcttatcacccctttgcagatgagcatcttgtctttgggaagatgcaatagaaaaggaacttgccatagaaagcagtagtaagacttcttatatgagactaagattttcatttcattagctctctccttcaccttgtttattaattctacaagcatttattgccatctcctatgtgccaagcactggtccaggctctggggatacactatgaacaaaatacagtgaagtccctgccccatggagcttacattctagtagggggagacagacaaacacataaatacaaaatatcagagggttcaaaacagcttagaggtatcttgcctgaattctgtttactgcatatcctcattcttgggcaatgataaagtgaagagagaggccaacaatgggctgcagcaatgttgctagtcccagctctaccatctacacattgagtggatttaagtgagttctcatctgatctgagcctcagtttcctcatctataaaatggggagaaattggattaaattacttataagggaaagggtcctttcaggcttttttcatgagagtagggtgctgaaaatcaagagccagtttgttgactcctctaaggtttaaaaaatatttaaatataaaatctaagaaatccttagagatcccatacactcaatacttcaaatgccaatctgaacttc

SEQ ID NO: 483479 - DNA, 1000 bp, Homo Sapiens
acaacatcactctttatattaaaaagtgcagaacacgaaatacaacatcactctttatattaaaaagtaaggaggtcctggggttaagtacacaaagcacctaagtccttcgggtagtttagtgtcagttctacaaagtaagctttggcttcctggcaccagtgaggctcaatcttctgaagtcttccagaaggcaggcgaggagagggatcaggcagccctccctccctcggtcacagtcacggggcggcctcgggccagacaggaggagatgacagacgacaaccagacggtaatatccaaggactatttacaggggggactgcttctgaggcatgactacgatcacttcatgaatgccacttctgggatctcgcccttggccttgagatgagtgaaggcctgggcagatctggtgtagtcccagttgttgtcctgaaggcacttctgggaccactcgaggttcatgccagactgggtagagaatgcttgcaacatttcctgctgctctggagagagggtgggcaccgggctggaggaaggcgtgggtgcaggcatagcgaaggctctttggatctcttcagaactggcattccgcacaaatagctcatcatttacaatacatagccctgaattgctagcaggaacagcaatgaatgtccgggtgaaggctcgcaaagaatcccgggactttccgtccacttccttgaagactccattgacagaaaaacacagcaatgtgcttgtctgggcgcttatgtctaccacgaaggaattgacgtcgtgctgggttttgggcaactcattgaggaaggcaacaacgttgagacgcgtgtgcttcagcagccggaaccgcaaggtagggtctttaagcttcttcacatttctgctatccttgaaatactcggctaagctgcttcgggcagggttctgaggaatgaaaggaatgctcagggaacagcaggccccatcatggtaggcatccaggagcccttgtcgg

SEQ ID NO: 483480 - DNA, 1000 bp, Homo Sapiens; identical to SEQ ID NO: 120122

SEQ ID NO: 483481 - DNA, 1000 bp, Homo Sapiens
ctagatgtggctgtgttccatgggaaaatttcagcatccaaagtgcaaagaaaaaatgactgtggcttttcttaccacagaaaatattgaccatcttcccttatagcctattctttattgttagttgggatgccaaaggacgacatattgacctttggaagttgggctccactggacaaggttgggagtatgggggtcaagcatcagaatgaattcaattttaaaagaaaaactgactttgaccccaaattaacccaaggttcagccaatggcacatcagagataaatatgcgttgtactttcacatttacaaggttgtgccactcaacactattaaagacctaatcatccaaatcaaagctacacatactcccatcactagttctgtcctcaatgcatcccatttttatgaaagctccatattatagctcagttcataatggggaatgagaacttccagttcttagaaggaggcatcctaaatcttctggtgtaatcctttcttcgccccaccctcccacttcccaccctgagacaagccaatcttatcagataggtagggtttctgtcattgtctcatggaaatcagttgaatgaaactagagaaagatcgttcattccatgagcagcatttggctttaagccaaagggatagtaacccccttcccccaaaagaatcacaatcaattccatactaacccttctactcctggaaagatgtctcatctaaaagctcccaacagtgaccagaacaaggtactgatattatgtgactcgaggagaaggaaggggagatatataaaattttagtaaaaccctcatgcaaaattaaacttgagtaaaagcctggagaatgctaaaaatagtaatgagaagaggaggctgtagagcagagagtacaggtgcatcctttcttatagtcaatcaatgctgggagtaataggtagatgtgacttcacttgagcattgaagaagcaaaaaggttgccttgccttcctag

SEQ ID NO: 483482 - DNA, 1000 bp, Homo Sapiens
gccattaaagttcaaccacggggccagcggaggatgcagaaggggatggaccacgtccgctggggccctggggaaccagggcgcggggcagcgtcgaatccttacctgcgcagagcactggcgagggtccgtccaggcacaagcgcgtgggagcacggagccaggatagcgggcgcggagtggcgggagcgcaacgcggcccgggccaccacccccgccgccttataaaggcggccgcggggcccgagtgaggcccgggcagcccgccccgcactctcggtctctctgcctccgggctgccccagcccagcccttcctctctcagcgagcctgggctctgacctgctccttgcgcgcgtctcctgttttgtctttaccgtcggcatcttccttctgcgtctcttggtgggagtctttgtctccacccgtctctttgtctgccttcctctctggcgtctgtctctgtgtctgtcaacatatctggctttctctgggtctctgtctttatccgtctctgcccacgtgtccctgtctctctgtctctgtccacgtgcacctctgactctgcacccccacccccgcttcctgcccgtgggctgccctccctggctaccgcaagaagaagcagaaggggacctcggaggggtggcatctggagggaaaccaccccctagacaggggcccttccctctttctctctttagagacgtaaagggcccgcaggtgtccggctatgtcccagccagagccccaggacatgctccctggatgccagaggaggggcaggcacttcccaggcagttgagtcagacagctcaagttcaaaactctgctctggtgaccttggccaagtcacttgacctatgtggaccagccggcccctctttaacaggcagacaccatctcccctggcctctcgctggtgcgagagtcatatgagacagtgcttgaaaactacagaggaaacgctaaaatcccggatagacgggagccagggaca

SEQ ID NO: 483483 - DNA, 1000 bp, Homo Sapiens
ttcatgtacaaactgtgaggactttttgacacaggcagacatatccctgtaatctttacagttttctaagaagctgattttactcaagttttgctttaccacttcatgaaggagtgagttcattaatcccctaaaagatatgccacgggctgacccgcctagaccctctccgcctgtctccacactgctctcggccccagaggctgtcctgtgtggacaaaaggcactcttcttgacccaaccttagtcagactcctttgggtctcttccccatgaggtctcaaacttggcctccgtccttggtgggcttgcatagctcagttttcgcaagaatcctgctaaatcagtttaaacagaatcgtccacccttgatagctgatcactctcggtatttgaaccatttcctcatttcacatcttttttttttttaaattaatttttattggagtatagttgatttacagtgttgtgttagtgtctgctgtacagaaaatataattaattatacatatacatatattcactctttttttagattctattccagaatacttttttttatattcatttatttatttatctatttttaaaatttttatggagttttattgttcacagacatgtatgttcccagacatttcacacctttgatgtaccagtccttggccgccttaaacaagaaccctgttaggtcagttgagcaagaatctcctcaccgctgatgtccccatttagcactggtccatcaacagattatcctctcatccctccttctgctccctgactacaaattcccaactttctgcagtattcaaagttaagcttgaaaaccaaaatgatgttatcactgaaggcgtcaggacggccatcatcacaaaatctacaaacaataaatgctgcagagggtgtggagaaaagagaaaaatcttgtactttaggtaggaatgtaaactgatacagaagagcctggagtttccttaaaaaactaaaaataaaccta

SEQ ID NO: 483484 - DNA, 1000 bp, Homo Sapiens; identical to SEQ ID NO: 309733

SEQ ID NO: 483485 - DNA, 1000 bp, Homo Sapiens; identical to SEQ ID NO: 309736

SEQ ID NO: 483486 - DNA, 199 bp, Homo Sapiens
  misc_feature (21)..(21): n is a, c, g, or t
  misc_feature (39)..(39): n is a, c, g, or t
  misc_feature (48)..(48): n is a, c, g, or t
  misc_feature (55)..(55): n is a, c, g, or t
  misc_feature (62)..(62): n is a, c, g, or t
  misc_feature (65)..(65): n is a, c, g, or t
  misc_feature (91)..(91): n is a, c, g, or t
  misc_feature (97)..(97): n is a, c, g, or t
  misc_feature (106)..(106): n is a, c, g, or t
  misc_feature (113)..(113): n is a, c, g, or t
  misc_feature (117)..(117): n is a, c, g, or t
  misc_feature (121)..(121): n is a, c, g, or t
  misc_feature (155)..(155): n is a, c, g, or t
aattgcttataaaacaggacnggaagtgtgggctttcantttgactanttttacntaattgnaantttggcttatagtttgggagagtagntcatantttggtagnacatganttanttanttatttatttatttatttatttatttatttattnagatggagtctcactctgtcaccaggctggagggcagtgggcac

SEQ ID NO: 483487 - DNA, 1000 bp, Homo Sapiens; identical to SEQ ID NO: 309737

SEQ ID NO: 483488 - DNA, 1000 bp, Homo Sapiens; identical to SEQ ID NO: 309739

SEQ ID NO: 483489 - DNA, 1000 bp, Homo Sapiens; identical to SEQ ID NO: 309741

SEQ ID NO: 483490 - DNA, 1000 bp, Homo Sapiens
ttttttttttttttttttctttgcctctctcacttattttttattcctaccacaaacagatatattcctctctgaagtacagaaatgccaatgccatatattttatcttttaactcagtgggatacaattcaagtttcttgtcctgaaaaaacaaaggcagaatgttgctttgtgactcatcatataccaggttcaacgagtctggttttgtgactcattcttggatatgagctaccccatcagaagtggttacccaattttggacaagactacagaaaaaatgcaattttggtttatttaatcttttgcttccagtttatatttcacatcctgttcagcttcattaatatgccatgggtcacaaaactcagtgcaataaaatgtgtatgaaagaaacacccttcagaaaagatgagactctttcaagtgtaaatactctaaactaatataagtcaaaatatattttttgtgcccagtgatttttaaaaattacccagtcaaccatttcctcaataattcaaatactcaagtgtccatttatatttttggaataagcgagagtgatcgtagtactcttcacagtgaaattttaactcaaatacactgtggaaaattttgaaaccagtcattgcaattagctcaaatttagtaatcatttttcaacatgagcttgtttggttagttattacaagaaaataacagaaaataaagtctcaggtggcatccattagaaaaaaccctgaatttttgtaattgttaaaaatctcaaaaaattcatcactgctgctttttgaagactttccaattcaatgtacttttttttttttttttttgagatggagtttcgctcttgttgcccaggctggagtgcagtggcgtgatcctggctcactgcaacctccgccttctggtttcaagcgattctcctgcctcagcttcccgagtagctgggattacaggtatgcgccaccatgcccagctaatttttttgtattttta

SEQ ID NO: 483491 - DNA, 1000 bp, Homo Sapiens
taaattttcgtaatgtggataaaaatttgtgacatcctgccacagcaagggagaataccgcaacacatacatgcatatactcttccagaaattaggtgtaattaatgatcattgtgaagtttcctaagccatatttcaaagcattactgttttaatgaagctgtgaattggcaggaaaatcaggcgcatccaacaaagtctcctgtcacaacgtaacatgaataaagtttgtattctttcatgttctgggagatgttttactctaaatgaataattactaatacattaagatagaagaaaccattggtcagttaatggcttgaagattgattattaagattcagtagtaccagtagtagctaataaatgtcatttgacaatattcaagacactgaaataacagaacaaaaatataaacactgaagaatttggataaaatttctattctaaacagctgtgaatggtattcttatctttggaaagaaggaaaagagagaccagatgctttcaggcgggtatgcattacagcatgactatgtgtagtgaactttatagacagtgaatatgaatcatacttaagcttttcaacaacactgataacaactagatatcagaaaaggagatggatagagaagaaatggatgaccggtgggacagaaaatgcaagagctgaagttaaattcctaacttcaggagagggctcttcctcggacttatagttacagtgtggatttcatgttgacagtgtcaagttgttgacttaaacctactcatgtgccttgaacttaaatcctcccaaataaatcctctatgacacccactgagccagtccaatcaggtcaggaatctcaactgtagaatttcacaatagctgcatcgataccctttcccttcttcagtttctcttcttcaaatcaatccaacttattgctgccagtctaatgtttctataatcctattatcttatttaaaaacagagtagtacatcaagatggttttc

SEQ ID NO: 483492 - DNA, 1000 bp, Homo Sapiens; identical to SEQ ID NO: 120124

SEQ ID NO: 483493 - DNA, 1000 bp, Homo Sapiens
tgatatttgggtgatactagcctcacagtgagttggggactgttctttctttctggaaaagattgtgaaaatgcattgttatctctttgaatgttttgtagaattctgcagtgaaaccatctgggcctgggattttttaggagattttttaaaataaattcagtttctttaatggttaatatagggctacctaaattatctatttcatcttggttgtgtttggtagtttgtggttcctcaaaaggcttcattacttctaagttttcagtaaaaaaactgttttagagtataaaactttgtgtaatattttcttattatcttagtggctacaggatatgaagtgacatcccctgttttattcctcatattggtgatatctgttttctcttaatttttgtgactcttgaaagaagtttgtacattttattgatttaaaaaagaaacaggccgggtgcggtggctcatgcctgtaattccagcactttgggaggccgaggcaggcagataacgaggtcaggagatcaagaccatcctggctaacacggtgaaaccccgtctctactaaaaatacaaaaaattagccaggcatggtggcgggcgcctgtagtcccagctactcgggaggctgaggcaggagaatggtgtgaccctgggaggcggagcttgcagtgagccaagatcgtgccactccattccagtctgggcgacacagtgagactccgtctcaaaaaaaaaaaagaaaagaaaaaaaagaaagaaatcgtcttttacttcattaaattttcttctctgctatttcttatttctaattttattaattattgttctgatctctatattatttccttccttttttttaagaaagagagactctcactctgtcacccaggccggagtgcagtggtgcgatcatagctcactgcagtcttgaactcctgggctcaagcagttctcctatctcagagtagctgggactacaggacacaccaccatgcctaat

SEQ ID NO: 483494 - DNA, 1000 bp, Homo Sapiens
ctggtttacataaataaatatttattaatataaaaaaaagtgttgcaggaatgatattttattgcatcccctttaaaataaattatgtgtatccatggcctaccagaatagcattatgtatagtgcccaagtggatgcctggctctcagtatgtaccagcaaataccaaactgctacaactttgcactttatgggaatgtgtttaggattttctgcaactgtactaatttttaaactccacagaaacctgcagtcatccctcatcccatcacatcccacaatccctgcagggtaaagccatccttcagtttctctattgccaagccaagctcttcagaatagactggctcccgatcttgttgcttatttccatcagcaaagtaagccacaaatgcatcagtgtgttcatctgcttctatttcaacatcatcttgaacctgctctatggtcaattcctcgagagcctgtggcttttcctccatctcatactctactccaaatatagggcttgcagagtagaccctgtgcaatgagtttatctccttcactgaatcctgcagcttttccactggatcaattttaaagccaaggacatatccaccactctgctgggagctttctatcaccagtgctaaaccaaattttgagtctctgatttttatggaacgaatttgcaggtaaggaatgctgacgttgaaactgtcattcatattggcatgccaaactattcttacattggttataaagaatgttcccaagtttccctgatcactggacaaattccacactccattgattttatcgtacacttgttctcgtggaagaagcctcagctgcttgttttggatgagtgcgcctctcagtttaagatcacgatacatttttgatgtctcataagctctgtgtactgcgataacagaagtaaacagccgaggactcccaggtacgaggtttgtaaagataaactcaaagcgagtgttgttacatttggttaagatgt

SEQ ID NO: 483495 - DNA, 1000 bp, Homo Sapiens; identical to SEQ ID NO: 309745

SEQ ID NO: 483496 - DNA, 1000 bp, Homo Sapiens; identical to SEQ ID NO: 309746

SEQ ID NO: 483497 - DNA, 1000 bp, Homo Sapiens
agttctatccgggattggatggtgcctaccctgcattcaggcaggtcttccccctcagtctgctgactcacagcccagtctcctccaaaacagctcatcctcttatccatccatctagctgaggctgagacaagatctcaccggccagctgggcctccctccagccagccaggttgaggcctggtgttaaccatcactatatggcactactccttctggctaatcccagagggcagaggtcatgcaggcaccgcatcaagccagggttccttgttttggtgtcagcaagaggctccgaggtggaagggaagaccgctccccagtcagtgtgttccagtgcatggcagggcagcagctggaagtaggaggcctgtgttcccttcgtggaaatgatcctgaggttgggcggccacctcccttcactgcccagagcgggtgctgatgtgttgtgcgttgctgcgattccctgcgtctctcctcacctgctgatgggaactctcagcagctcctctgcagaagctgggtcctgtcccttccctgggtgttgatatggtttggtctgtgtcccacccagtctcatgtggaattgtcactcccagtgttggaggaggggcctgttgggaggcggtgggatcacagggtgggttctcaggaagggtccagcaccacccctcttggtcctgtgcagtgagtcccctgccatctggtggtctccatgtgtggctgcccctctgcctcccggctcctggctcccagcctgtgatgggcctcctaccctgccccttccaccatgactgtgtttccagaggcctccccagaagccgagcagatggcagcaccatgcgtcctgcaccacctgcgcaacccagagccagttaaaactcttttctttctaaatgacccagtctcagtggttctttatggcagtgtgagaacgggctgcttaccggtgtgataagggcaatttgtgaaatttgccaggatatttttaatattgttt

SEQ ID NO: 483498 - DNA, 393 bp, Homo Sapiens
tgaagaaacgatgaccggtgttccctggccccagacgtcgagagcgtagtgtggccccgggtgcggccccaagggcccccgtgagcagaagtagagggccgtgtctccggctcccaggttggtcatctgaagagagagagacttcctgccattgtctctggaaatcgtgaagcggccctgcacggagcccaagtagtatgtcgtaaaagtagtagtaatgcctgatatccactcgagacctcttccgggaacctgacggacccagtgcatgtcgtaggtgctgaacgggaaaccggaggcagaacatgagagtctgagggaccccccagggtggactcggtctcccccagattccaccaagaagacgccacactggacaccttgtaaaacagc

SEQ ID NO: 483499 - DNA, 1000 bp, Homo Sapiens; identical to SEQ ID NO: 309747

SEQ ID NO: 483500 - DNA, 459 bp, Homo Sapiens
agtcttttgatggtatttcccttctgtatgtcatccacatatttgaggaaatctaagtctagttgataaccatagggggtctccacaaagtaagggtctttctgttccttgtcctggtctccactgagaatatcacctgcttttcctgaggcactgccgttaacctttgtggtgtgagccatgctggcttgagtccaatgagagatccagaaaggagtgaggagtcatgcaaattttatgcatcaagttctcaaaggcattcaacccagggctttccgagacagttctgtgaattcaagtccttccccattgacaaaatgttactgtagactttcttgttaattgaacccaagatactgccagcctgacgttagaggggctcacaaaacttagccagcaaccttttgtactgagcaaaacacagattatcaaatgagcagccagcatgtctaagggact

SEQ ID NO: 483501 - DNA, 1000 bp, Homo Sapiens; identical to SEQ ID NO: 309749

SEQ ID NO: 483502 - DNA, 1000 bp, Homo Sapiens
  misc_feature (318)..(417): n is a, c, g, or t
  misc_feature (640)..(739): n is a, c, g, or t
  misc_feature (887)..(986): n is a, c, g, or t
agtgcaggaccttaccatgaggaaagagtacccaatccagaggctgcgccagcccagggggcactgcgggatggtgatgtcctggctgtgcacagcaatggcttgcgagggtgcctcacacacagagcagcggctgatgtactggggaatctgggtctggctgacgggcatcatggggataggggcggtagtggagagccagtaagatttatcattgcgcctggcatagtggcacacctcgttgatgttgcagtagatgaagggcatggtgctgaagcggggcagacaggagccagcaaagcctggaaggagagaaannnnnnnnnnnnnnnnnnnnnnnnnnnnnnnnnnnnnnnnnnnnnnnnnnnnnnnnnnnnnnnnnnnnnnnnnnnnnnnnnnnnnnnnnnnnnnnnnnnnagagctggtacctacccaggtcctggttgtgggctttctcttgcccctccacaaacagtaagctgtaccccacccacagctggctcatcccgatgggacacgggggcacctgttccgactggctgtgctttaccaacgtgtagcccactctcatgctctggccaggcattccaggcatcccgaaggggccttgctgccctggagctcctgagagagacagatnnnnnnnnnnnnnnnnnnnnnnnnnnnnnnnnnnnnnnnnnnnnnnnnnnnnnnnnnnnnnnnnnnnnnnnnnnnnnnnnnnnnnnnnnnnnnnnnnnnngtggcatcatcagaccttcaaatcctggagggccttgcagtccaggcagaccaggatcaccaagagccccaggtgggcctgggagcccactggggccatctttaccggggatgccaggtaaacctttggagcctgcaggagagaaagnnnnnnnnnnnnnnnnnnnnnnnnnnnnnnnnnnnnnnnnnnnnnnnnnnnnnnnnnnnnnnnnnnnnnnnnnnnnnnnnnnnnnnnnnnnnnnnnnnnntggcaccctcctca

SEQ ID NO: 483503 - DNA, 1000 bp, Homo Sapiens
  misc_feature (360)..(459): n is a, c, g, or t
  misc_feature (616)..(616): n is a, c, g, or t
agattggaagtccatattttatttctctagtgacatatttacagttcaatataaattaaaggcctgcttgtacaccaaatccaggtcccttgggtggttcagtcaaagaggtaagacctccagctggctcacaagagaagcgtccactcctgaaatgaaaagtaatattaaactattaatgattaacatttgtaaatttttacttaaattgtaatggttacctcacaagtgcccagttaagtaactatttttaccctaagaactagcatagattatttaattcaaacatttcaactgatgcaagattttctcttcctaaattttaaatatgggaaaacatcaggcttcaccataagcatnnnnnnnnnnnnnnnnnnnnnnnnnnnnnnnnnnnnnnnnnnnnnnnnnnnnnnnnnnnnnnnnnnnnnnnnnnnnnnnnnnnnnnnnnnnnnnnnnnnnaagaaaaatattttaaaacgggagtaagagcacatcacagctgttttaaaacattagaataccgtatggacatcaaaaactccaaatgtgctgagggaagaaaaaatttatatacataaacaaaaaatttgagggattatgactaaaaccatgagancattttctagtattaagagagaattttgagtgattgaacacatacatggaataagggttgtttaaaagtgaaaatccaagttcataactgaaggaaagtaattaatgtaacacaggtatgggacgggagcaacctggataaatagtgaacagaaaaagatctaggtattatgaagtgcagttaattgtgtaatgtctctgaagtaggagttgatataattaggcacaattattacaagcataatgtctggaacaaaggaggcagtcccacaatgctctgtgctgctcagtatgtatctcaaaataccatgattaggccgggcacagtggctcatgcctgtaatcccagcactttgggagtctgaagcgggcagatcacgaggtc

SEQ ID NO: 483504 - DNA, 1000 bp, Homo Sapiens
  misc_feature (778)..(1000): n is a, c, g, or t
ggatcccaagtctagggtttctgatttaattgagctggggtgtggcctgagcatctcagtttttaaaattttgcggcttgattccaatgactagcaagagttgaagacctttactgttgaaacccagtcatgtctagtagagtcaaaagtaatgaaatacactgagtctttggacagcaagagcagaaaagtgaaacccgatagcagctgaaggtttatagaatatttatttcttttttggttgcagctatctccttcccaacctaccactgctaagactgtttcataagatgcacttctctacactcagctaatgaggtgtttcaatcagcagttgttctttggatgaggagccgatattgttttaaagcctattattttcttgggtgggtattctggagcatggggagctgaaagtgttgcaaggaaactgctgtgtgaaatttgatcaggtccttggtattcatttttatgtttcaataactgatttattttttcccccttgtacttaagatttaacatgtgttgtatttccagcagttcaaatctaattgtgtcgaatttccaggattagaggaaaagttgctccctttcagccctcctactagaagcactggagctaggctggcgggcattggaccctagtaggtatagcaggctgtgaagagcgactgggtggaagcagccccagaacaacccgtgtgaacatactgtcctttggcggcctggcagttagcctagaagacaaatatgagagaggagactggttagagtaaannnnnnnnnnnnnnnnnnnnnnnnnnnnnnnnnnnnnnnnnnnnnnnnnnnnnnnnnnnnnnnnnnnnnnnnnnnnnnnnnnnnnnnnnnnnnnnnnnnnnnnnnnnnnnnnnnnnnnnnnnnnnnnnnnnnnnnnnnnnnnnnnnnnnnnnnnnnnnnnnnnnnnnnnnnnnnnnnnnnnnnnnnnnnnnnnnnnnnnnnnnnnnnnnnnnnnnnnnnnnnn

SEQ ID NO: 483505 - DNA, 1000 bp, Homo Sapiens; identical to SEQ ID NO: 309751

SEQ ID NO: 483506 - DNA, 1000 bp, Homo Sapiens; identical to SEQ ID NO: 309752

SEQ ID NO: 483507 - DNA, 1000 bp, Homo Sapiens; identical to SEQ ID NO: 309753

SEQ ID NO: 483508 - DNA, 1000 bp, Homo Sapiens; identical to SEQ ID NO: 120125

SEQ ID NO: 483509 - DNA, 1000 bp, Homo Sapiens
ctggccttctcggccaccagcccacctcctccctctctccagagcttcccccggcaaggtccctgctgggctcaacccaggccccccagcacaggtaggagccttgcacctgcccttggccctccccaccctgcgtggtgccaggacccccaggccacagggaggccccatttctctctgccgctggcccagtggccctggagtcccactgcaggtggggtgtgcccctgacctctgaggaggctaagcgccctgccctcagccaggccatcccctctgctcagccccagggccctgctcaccaccccttccccttacctgcaccacaggctctggctgactctgcccaggccctgaatgggcccctctggcagccctctgctgctacactgccctgcaccacctccactcagcttcattgtgctggtggccctggctcctggcagcccatcttgctccttctggggcgccagcctcagaggccttcctgcctagggtccgctggggccagccctgggaccctcctggtctcaagcacacattccccctgcagccacacctgcccctgcctgagagctcagccccgagccctggaatgccttcccttctccatcccagctcacccttgccaactgctcagtgggatgggctcacactcccttcctggcaccaggaggctgcactgcactttcaccagccctcagctgtctgctgccagcaactacccagctcctgccaaaatctaggagctgagtgatgcctcccaccggccctgctcacctgtggttgccttgccctgagctctagtgcctgtcccctgctcgtcctgcctcccaccggccctgctcacctgtggttgccttgccctgagctctagtgcctgtcccctgctcgtcctgcctcccaccggccctgctcacctgtggctgctctgctctgattccctgaggctaagcctcagtcctgctcaccttctgatgctctcctctgtcccctgagc

SEQ ID NO: 483510 - DNA, 1000 bp, Homo Sapiens
actgacaggcacttgggcaacagaggacctcagccctctctggactgggtgggaacccccaggtcccctgacctacctgcctcccctgcccctttccctattcatcccatgactctttttggagctcctactctgtgcacagaactgtgccaggctctggcttggccggtggcagaagcaggaccccagttctaggcaggccccagggctgccactctgaggataaagcggtgaggatggaggggtatgcagagctgcaggggggagaggtggctgggctgagcagagggtgagctttgtgccagccccattacacaggccacccccttgactctcccactgaatccacagcctggtccattgtaagtacaggtgacatggcttggacagaccaggcctctctggaggggtcttttgatttttgaggtcatatctttagtaggatgcccaaaagggtccctcttctcagatggggtaacagaggccagcatggacagacagcttatccccgggccacagtggggcatagggagcgctgaagccagctgggccttgcaggcagagcagtgtcagctgatgggagatgaagctccgagctccaatgtataggtcccacctgcccccacccctggggccagccctcggtggcttggacacagggctctcaacccctccaccaggtttgctgccagagccgactgtggctgcacctaccaactcaaagtgcagctggcctcggctgactacttcgtgttggcctccttcgagcccccacctgtgaccatccaacagtggaacaatgccacatggacagaggtgaggcctcacccacttgctctctctacccactcctcccagggccaggatggcaggaagcaaagggcagcctcagggcccagggtgcccctgctggcctggagctgttgccttccagcctgggcagctctcttagaggacctggctcctgccttcccctcccccgtcccggtggtcacttcct

SEQ ID NO: 483511 - DNA, 1000 bp, Homo Sapiens
tcagaacggtgccaacctgacggtgcccgagaagcgcttgtccttctggggatcatagttcttcaagctgatctgcaactccaccgtctccaggaaccttcgagagaggaggggggttaagcacccgccggccctcgccacccgcgccgtgccccagggtcggcactcacttgcggcgcttgcgctggttcccgtgcaggacttcccgcaccgcctcgtacagggtgtcgcgagagactttgctgctgcgggagagaagcgacagggcgctcagggccgcggagtccacacgctcggactgcctggaagcctccgaggtctaggcttcgagacgggcgggcggcccacggcggactcccccgtagattccggacaccaagtagagcgacgggagctcagacccagacccaagccccggtggaagagggaggctctcagtgatcggacctggtaggaagggcgacccgcaggccgacccgccttgagaaatgccccgcggcgcaggtggcgcaagggtccgcggcgcaggtggcgcaagggtccgcggcgcggcctacaggatccgaaccctcggcggggcacctgaaggcgcggatgaacgcggatagggctttcaggaccaactcacctcatggcttctcacgccgcgctaaccggaaaagagactagcatgtcttgcgcatgcgctcaaatagtggccctgatctcgcgataatgctttgctcctcggtcctacccgcagagcggttgggtgggccaaccccgagaagcgcggccttctctggccgctggggggcgtcgctgggccgctaggccggcgcggtaacccacagagttgtcgcagtcctgagcgccccgcggtcccccggtaatgtgccgattcgcgcccgctgctgctggacccctagggaagcggctgggttcggggctcgagcttcggtagtcacacgtactggtacagcccagtgatgttcactgacagcgtggattccggcacgct

SEQ ID NO: 483512 - DNA, 1000 bp, Homo Sapiens; identical to SEQ ID NO: 120126

SEQ ID NO: 483513 - DNA, 1000 bp, Homo Sapiens
ttgaggatgcacacttgatactgacattcagttgcagaccttggactgggtgggttttcacagtgctggaggtggggtgacccaaaaaggattaacgtggctggcaaacctccccatttcaccgcatttgtagcttcctgaggccccgggaactgcagaggctcgatcttcagggaggtggaatgatgtgttctgggaggtggagggatgtcaggggctagggaagagcagccatagacaaccccaaggatagcatcccagaaagagccaagggactaggaagggcaccctgtgtgtgtgtgtgtgttcacccatgcactctggttgttttggagcaaccatggcccgcagcctcctggggcttcataaagaaaccaaggaagattctgcagttgaccctagtacaagctatggtcaggcacaaaccacaccacaacctgcgtgcgccgcttgggcgcagaccgtctacaccacccgcaaacctactggctagccccacttccacgcactcagaggccccagttctcaggaatgggggcataatcctgggccgcgcgcgaccttgtgaactgcttggaagaaggattgggatagtgcccaactaatgaagatccctcagaccagaccagactcagcagcgccctgcccctcatccacagtgggtcctggggccagtcaagattttgggaccaaacacatagatgcttggtggtttcgcgaggttgcgggcaagaccccttgaggtgccaagtcctgggccgcccctccagggctggccagcagggggcagcgtggctctgagcgtggaggccagggctggtccgcgccggcagggccagcctccagtgcccagttgggttcccgggcctcgaagttctagcccgcacaggactcaggagcgttcccggaggaggtggggatggggtggtgaaagcccagagcgttttaacttctgcatcccctgccgctttctcagccagcagggcccggcttgaggctg

SEQ ID NO: 483514 - DNA, 1000 bp, Homo Sapiens; identical to SEQ ID NO: 309757

SEQ ID NO: 483515 - DNA, 1000 bp, Homo Sapiens; identical to SEQ ID NO: 309758

SEQ ID NO: 483516 - DNA, 1000 bp, Homo Sapiens
cccttcacatgtattctaactcatacatgtgggctacaggaaagaggagacccaacataggagagaaaaagggaatccccagaatgacagtgaagggagatcccagatagagaactctgcctgcctcaggacagagggcagcagtccagattggagcagtgtaattttccatgttgagggttctctgtagttgtatagtttttaacttgaggacagaaagctgaaatgggcctgaagcagatccttatctgtacttggcttgcctggtgccgatgacatttccgttctccctgctacacagctggccagctgaggaggtgtgggtgtgctttgatctcctcctgaaagctgggggcagggacatgctgagcttagaagcagaaaatgcagagcagccctctgccgttaccatatttctgggggacaccccgttcttggctcacacaatagcctccctgatcgtggggtgccgtgtttccaaggactcactcagcaccacttctgcttccccagaagaggctctggaaaacttccaagggatgccgaagccagtctataactcagagtcaatgttcagtttacctgttcttgggattgttcgtctaattgtgatatcacctttttcttacacagctaggtcggtgttattgtttttcaaaagtaaaatgtattgcttagagatattataaggagtaaaactataaagtatcagaatgattacaagaaaaatgaagtagtggttacctctatggagggatggagagagggaatacccttggggaggggcacacggccctgtaaggtactttaccaggacctgggtttgaggcggatagagcaggaaagacttttagtactatttggctttttaaaccgtatgcatatattgctttgataaaacagctcttctatgctgggaactgggtttccatagttaagtctaggttcttgcctttgggtacttttttttggagacagagtctcgctctgctacccaggc

SEQ ID NO: 483517 - DNA, 1000 bp, Homo Sapiens; identical to SEQ ID NO: 309759

SEQ ID NO: 483518 - DNA, 1000 bp, Homo Sapiens
gaattctttcaaatcaaatcatcaaacactctaaaattgggcaaagtacacttttccagatctgcaagttacttgtgtacataagaaaaagtccttcgcatttctggtataagaatttaaataaaagaggaatgaaacagttttctatccacaatatttgtgaggatgttttatactcctggttaaagtttaagttgctgattacttttcaaatagataatttggtggtaaatactacaattaaaaaatacgtatgccctttacccatcaattccattacactaaagcacccttaggaaataaagatacatgcactttatttttcacctcacttattttaaaaagaacccaaagaatggatcctataaataaacttcagttgcatccacaggatggaataatatgtgaccattgaaggtggcaatagatacagaagtatattgatgtgcaaagatgtattttgttatagctagtgagaaaaagatcaattaaattgtacatacaaacatactatggtcttgttttatcaaaaaatatgtacaaaatataaaatttgtaatttctgagcatttgtattttaagtaaagttcttttcctttttcttatctgtgattgctgcagtgagcatgtacaaaacttctagtaaagtttattaataaaggaataatccttgggaagacaggaatatgaatcttacaatattaaaaataatttctcactttctattttttatcattgagtgtattgttatcttctttgaacttttagcctcttcagaagtaaaaagggaatatttttatctgtttccagattttattatctatatattttattacgtacatatgtttttcttatgtattcattcaatttatgcaaacaatgatagattaatcatttcattttaattgtattcttaaaaataacatttaaatactactattgcaaaaatattgctttataggagtttatttaaaaatattgaactccccaactgtattta

SEQ ID NO: 483519 - DNA, 1000 bp, Homo Sapiens
tcgatcctaagtgccagttcactctcaaagtgcttaagccacagatgcacatattttgtttcatgacttacctgcccaagatatcattgaaacgtggatctaattcaatgttgtatttgtcaatatagtcatataaatcttctgtccccagaaccttggctatcctcaccaactagtattaaagaaagacaaaaacccatatcacaagcatattatattaacaaatcaacaattaacaatgattgaatttacataaacgggtcatcatgtctacaggtatgaatgctacctcctaacagtttagacttcaactcaatgtgatagtgttagaaaaagcaaactactttataaactggtttcttcctcttgaaatgtcaccctggtgaacccttatttttctcccctcaaaacccaattgaagatgtcacttcttttgggaagctcccattgcacactcaaactactcaccactactgccttttgtgccttgtccacatttctactctgaagttatgactgtaacctattttgttgtatgtttgactcccttacaagatcagctatgaactatctgaggggaagaaaactattctttcttttttctgtattcctcagtactgcatgcacttgatacagagttattgactttaatggaattcaggttgtattctttgactcattaaaattggacatggtgctcaaagggaacaagacaatggtaccttccacaaggtcctagaatcattccaggttcttgtgaatgaaagagccctttgatcttcaagggggaagtggagttagtttaagaaacatctgtaactcaacccatataaagagccaaaaggatcacagaaataccacatatgggctcacatattggagaaaacaccatattggagataagggtttattaggagaattctaaggtaatgtcctattttaaaaatctggatgacaatttatatgtattcttcacaataaaataagcaatgcaaatgac

SEQ ID NO: 483520 - DNA, 1000 bp, Homo Sapiens
aaatcgtttttctttttctttttttttttttaataagttaaagttaatacaaatataaaaaggggaaagtcctctagattcaatgacatccacaaattgtacattatttacaccaaaagcacagggctcgtgtgggtgaacagtctgcagtcaaagccgatgctgggtgtcctgtagtgtagcagcccccgcgccgggggctcaggctcaactgagggttttgtcattttcaagtctgaaagtggctgttctcctgcctttgttgtttcttcttttcctggcgtctgggtttttctcccaatggggtgggtggtttgtgtcccgattcactgctagtcccagaaggtgtccagccgagactctttcgggaggaggctcttcgtgctggtactggtgttgtgatcggaacgtgtcgatcccctcttctcatcactgctgctccaactggatttattactccgggaatggtcagagccttggttggagcctaagagaatggaggagggcgtctctctggagccagaaaggtcaagggtcgagccactctccttgcttttctcagctgacgtctccttctctttggaggcgctggccgtttctgaaggtgctgattgtgtgctcgaggagctcccctgggaggacttatttagtgtttctgtgttcacctcagcatccgcttcctgctgaggagcagtagctgactgggtgcaggacttcatgtgctcaggccagtgggcttgctggcaggggtagtcacagtagctggtgttccaacagcagtaaaagatggcctccttcttgcagttggcgcaccactgcttcttcttggtctcatccaccgcctgctgcttctccaactccagctgcttcttcacctcggcgatgagccggtcccgctcctgctccaggctctgccgcatctccgccatggtcagctctaagttgtgtttcatttcggagagctcttgctggtgcagccactggagcttctctatctcga

SEQ ID NO: 483521 - DNA, 1000 bp, Homo Sapiens
cagagggaaaagtttattgagtcagccacagaggaacagagaaacagacacaaggaggttctgtgtgcatggaggaaatcagggcgccgcacagctgaaccctgcgcaggacagaggggcgtggacagcagcgcatgccacaaacattcacctggcaaagaaacagagcagaacctaagggctctgtgtacacacagacacaaacatgaggccactgttacccaactaatagaagagagtcatgagcgacacgacacttccttacgacctctctctcctaaaacgtaacattatgtgtttaacacacgcttaccaccactgctaactcagcaagcgcgattacagtgctccaacttaataagttgataaaaagctgtcccgtggccagttcacaatggaactaaatagtttcgttccgagatgcctggggagtttctctggcaacgaggcatttccaacaaacgggtcattctgtcaccaggggatggtctcagtccacggcacagagcgacgtgcccctggcagcactgtggagggcaagggatgccgctaggaggggtgctcagtcctcctggaggacccaaggaggggctggccaaggggccaccttgagctctggccggagggtgatggctggctttgcatgaggaggtgacaagaactttgggctgggcccccaacatgctgtgtgcacgggccttgttcaactcggaactgaactgacacctctcccaggtggtgaagggcagaacccccccaggagctctcggaagcaggggtccctcacgacaggcctgtggcaccaggcttggaggcagggagctggtgtctctcagaagcggcgcgtgctggtgggaggcggagggacaaacgaggctgactccgcagcagcagtccctcacacgctgtgtggtggctaaagctggaccaaagttaagaagcgaaacagcgtgggaaaaggtgtccatcttttctgaagccggttaatgtctagtgtgga

SEQ ID NO: 483522 - DNA, 1000 bp, Homo Sapiens; identical to SEQ ID NO: 309760

SEQ ID NO: 483523 - DNA, 1000 bp, Homo Sapiens; identical to SEQ ID NO: 309761

SEQ ID NO: 483524 - DNA, 1000 bp, Homo Sapiens
gtatttttagtagagacagggtttcaccatgttggccaggctggtctcgaacccctgacctcaggtgatccacctgcctcagcctcccaaagtgctgggattacaagcatgagccactgtgccaggcctgccctacctattttacagggttattatgagggctaaatgaaatattgctttcagagtataatttcagtttctcatctgcaaaacatctatttgacttcaaaaggtggctgtgaggatcaaaggagatccctcactttatgtttgctagctttctttggacttttcccacaacataacagtcctctctaaaaagtttagaacttaataccctctgacatacaaagactggaagaacccggaatgataacttcaaacttgttttatgagaatacaaactaagcaactgttctatctgccacagaggttccaatcttggttctattagctgtatcactttgggcaaatagtttgaatcttacagatctccagttcgtcatttgcaaataacggatctggatcaggtgactgccacaggtccccttctgcctttggatcctctgatgcaaacatgattagtgctctagcttagtgttccccaaactgcagtctctcacataccaccttcatgactttccttatctgcctacaacctgtactactgtttacttattatttttcctcatatcaattatttttgctcagctttgtccttactatatttccgtgaaataacaggcttgataccataattacatcttttccaatgtacactataatacataacttaaaaattgggcatctatatgccatctaaaatcatctcatacatatacaccagttatgtcttctaccactctagttcattttgaaacagcaaattcataatgaagattccaagtctaaaatgtggatcgtgtatatcaactcagtaagctactaagttgttaaaaaaaaaaaaacaaaaaaacccacaacaaacaggaagcctaca

SEQ ID NO: 483525 - DNA, 1000 bp, Homo Sapiens
cctttttctttgagacggagtcttgccctgtcacccaggctggggtgcaatggcatgatctcagctgaccgcaacctctgcctcccaggttcaagcgattctcctgcctcagcctcccgagtagctgggattacaggcatgtaccacgacgcccagctaattttttgtatctttagtagagacagggtttcaccacgttggccaggctggtcttgaactcctgacgtcgtgatctgcccgccttggcctcccaaagtgctgagattacaggcatgagcctccttacccagcctcaagtacattttcaattaaagcactttcaaattcattattatacttaataccatctcaaccctgtgcatgtggcaccattttacagaggcagagactgaagcctcctgtgcaggagaactgacagagctggagcccaaacccaggactctttggctccaagttcagggcttttcctaccaggccaccatcatggagccttagggcacttttttatttccagccaaggactcatctaccccagtaacctttgccatgggatcaggttgaaagtgtcttgctttactttaggatttccattcctaaagtgtgctccactcttggccacagggaggggtaaccacaccacagttcaccagagaaacagccacaaacactggacccgtttccagaattgctcaccatgcatatacctgtgttggcttatttgctcatttcaccacacaagttggcctgactcaatggtgccagccttctggggcaaaggccttttgaaggttaagaagagggcccctaaccaagagaggcagttcattttcaaatggcttggttcaaaatttgggtagcaacaagtggggactcagccaggcacagataatgtccacacatgacaagcaaagacctggtcccccaagtcttgattgatttctgtgagcgggcaagaaatcttccagactatgcagccaatcaggattaatgagattcatgc

SEQ ID NO: 483526 - DNA, 1000 bp, Homo Sapiens
gacaggaggaagtaacatttattgagcaactcatttaattttcctaacaatacgccaaggtaagcaaagccctagttttttatctaaggaggctctgggaaattatgtcatttgtccaaagccacacgtctaataaattacagacccaggatgaggacccagctatatcttcctgcaacacctgtgttgccagtttattggcagcctctgcagttcaggaggacctagcttgtcccttgggaccacctgaccaggtggcctgggatgaggaactgggaggccttgaactaggcatccttcacttgaattatcaggtcagcctttgagcctgggagaccaacaggagacaggggccctatggaatcacaacccaggtgagtgccaggtctctgctggcatttgtgccttggtgatggtgccagctgccactccaagactttggcataattggcaggtgccgcccccaccccatcttgcctctgcctggcggggctaatggtgcctctccttacccatcaccccagcccccggttctcctggcagtaccacaggactcggaatctttggaagtaacatttctgtctcccactcccagcgatgacactggatcacttcccaacacagagcaactgtttcattgtgtctctacaatccctcctgcacatactcactcgatgatcccagcacctggtcacccctccctgcccttcagctgcctccgtccccataaacactcccccaggatccctgccacccacccaccaggtgcatctcgagcaatgggcctcgccacctgaatctgccacaatgcaaggtcaccagcattcctgccaaggatggggaacagggtgactcagttcccgcttgctcatcccaggaaagggaaggggggaagggggggaagggacctagatattcatttgcttttgccttaagcttcatcgagaaggagactcgggcattgctaccagttgacctaacgggtaatcccccttattag

SEQ ID NO: 483527 - DNA, 1000 bp, Homo Sapiens
gccagaacagagactcaagccaggtttaatgatcattgtctagttttcagagcccagaggctccaagatttgccagcctaggtgtacacaagtgggaggaatggggtcttggacacgggaggcctgcttgctttgtcagcagagctacgaggaagtacagaggtaagaacacacagaaaactggatccatctgctttgctctccccagctggggtgtaccctctcctggcccctttcttgggccccataaatacaaaataataataataataataattacacagattgtagagccctgtcatcctctgtgtccagggacacctgcttcctgggagacatgtctggtttatgggtgtggggtagggtaagaggaggtggtgatctctcggccttttcttatacccacacctggcagttttcaacacagggttctagtgcgcttacatatgctgattattcaattctccaattaaaaagctacctttgggttctatcacctgaaaccacgggaagaaacaaatcaaatctcttggtagggcagccaggtacatctaccaggtgtctcaaactcaaggccaaactagtggatatagtcaggagacttaagagccacagggccttttctcattccctaaactgggtaggaattatgaagaaaacggccctcccagtcctcaggagctccatcacgatgccccagaaggcctgcttcatttaacgctcactttaaagatcttcagagccctagatggtgccaagcggggagactgcagcatggagatgagattttcccagatttcctgatgagtctgaggagggagtcctagttcctatagctccagtaacaaaattctcaggagtctctggaataaatcaagacaacttttctctcctgaggacagttaacaggaagagcagctcacagctacttagccccttgccagtttccttctgagtccttcaatgacctagttctatcttaattgctcatatattgctc

SEQ ID NO: 483528 - DNA, 1000 bp, Homo Sapiens; identical to SEQ ID NO: 309762

SEQ ID NO: 483529 - DNA, 1000 bp, Homo Sapiens; identical to SEQ ID NO: 120127

SEQ ID NO: 483530 - DNA, 1000 bp, Homo Sapiens; identical to SEQ ID NO: 309766

SEQ ID NO: 483531 - DNA, 1000 bp, Homo Sapiens; identical to SEQ ID NO: 309768

SEQ ID NO: 483532 - DNA, 1000 bp, Homo Sapiens; identical to SEQ ID NO: 309769

SEQ ID NO: 483533 - DNA, 1000 bp, Homo Sapiens
cttgttcattttttctactaggtgtttatgttttcctgacttatcagcaagagttctctatatatttttattgtctagatattacacataaaatctcccgatcagtaacttgccttttattttctttatggaggatttgttaacagaagtatttaattttactaccatcaaacttatcaatcttatcttttaaagtctgtgttttctacgtcttaatagaaatgtcttacctgaggccttcacattacaaagatatttttctacatttcttctaaaagttgtaaagatttgttttatacatgtagtcttcaatccatcaggaagttagcggatatggtaacacaaggatcaaatattatgtttttcaaatctcagctcaatctaatgaagttagttctatctttgcccgctaatttctaaagctacctctgccatataacagattcctaaatgtctcttcctaaactctatattcagttccagtgagtcaattcatctaaccctacaccaataccatgctgctttagttactctagctcgaaaattagtctactagcacagtccctctgcaaagttggtgttttttaaaactgtctttaccattcttgagcctttgttcttgtgtacatgacaattttagaatcaactctttgttttccaaaaccaactgggactttaacagtcattacaaggttgtttttcccctaaattagaaaaagctagggccagacacagtggctcatgctgaggtgcgaggattgcttgagcccaggagtttgagaccagcctggaaaacatctctactaaaaaatgtttttaaaattagccagtcatggtgtcccatgactgtagtcccagctactcgagatgctgaggtgatagaatcatttgagcccaagagttcaaggttgtggtgagctgtgatcacgctactacactctagcctgagcaacagagtaagaccctgtcacaacattttttaattattttaaaaattaga

SEQ ID NO: 483534 - DNA, 1000 bp, Homo Sapiens
cacaattctagggacctccatggaggcaccttaagtactacccacacctctgcttttatctggttcatacactgggatttcacataagattttattgaaaaaaaaggtttcactgcaaaaaagtgttgaaatcaattctctggccagggtctgccaatacacagcaggcatccacagggcccactgtagatattgctggtcaagcagaacattcattcctgctcaatctaaacttagcatctcatcacaatgtgccaatcagccactaccagttagtagtaattggtacttggagtgagacttacttgttatctcagaaatagaccatcatagagctgcatacttgaatcatattgtcttggtgcctcatagaattgttttcattcaatcaggcatcggttttgttcaaccagttttacattaaaaaaaaacagtgatataaaagttgatatttaatttattgtgaggatgacgttgaggatattctctagtacttgatccacaagagaaatctctcaggagtcagtctcagtattgtgaggagctgtgagcctccttatcaaatggtttgctttttgatttacggacattatgagtcttgtacctgaatgtttacttcttgctttgtctactaggaagctcagggacaaattggtaacctcatgttatatatttttgagaactagcagttcgtctgtattatcttattttccctgccattcttttctctttaaccatttttctttgtatatttattttatctgaaggtatagtttatatctttgtagggcactttgaatctttttaaattatgatgtacttaacaacatgaataaacagtgttggcagttcaaatagagagtaagaaaaatttgcaaagaaaatgtaggtcttactggcagacttatggtggatcaaagatctccggctttactcagaaagtggtagaaccaaaaacagaaatgaggaaggaaagggaaagagaattacttacgtatga

SEQ ID NO: 483535 - DNA, 1000 bp, Homo Sapiens; identical to SEQ ID NO: 309773

SEQ ID NO: 483536 - DNA, 1000 bp, Homo Sapiens; identical to SEQ ID NO: 120128

SEQ ID NO: 483537 - DNA, 1000 bp, Homo Sapiens
aaggcaaagtcaggcatcgcctaaaaggagtggtccctaatctagcccccaagtctgggagcagaaaggccaggtccattctggcccaagtgacattgttagatcctgtcccctcccccaatcactgctgcttgcccagggtgcctcttcacagtttcccatgtggcagcagtagtggcagaggcagaagtggacttattgtagattgcagtacagatacatggaaacaatcatggcagccagctcgaggcccccaattccagctgccacaccacccacggtgactgcattagttcggatgtcatacaaaagctgattgaagcaaccctctactttttggtcgtgagccttttgcttggtgcaggtttcattggctgtgttggtgacgttgtcattgcaacagaatgggggaaaggcactgttctctttgaagtagggtgagtcctcaaaatccgtatagttggtgaagccacagcacttgagccctttcatggtggtgttccacacttgagtgaagtcttcctgggaaccataatctttcttgatggcaggcactaccagcaacgtcaggaagtgctcagccattgtggtgtacaccaaggcgaccacagcagctgcaacctcagcaatgaagatgaggaggaggatgaagaagaacgtcacgagggcacacttgctctcagtcttagcaccatagcagcccaggaaaccaagagcaaagaccacaacgccggctgcgatgaggaagtagcccacgttgacaaactgcatggcactggacgacagtggcccgaagatcttcagaaaggatgccccatcgattgacacccagatgcccactgccaacagggctgcaccacacagaaagatgagcaaattgaagaggatcatcatggtcttaatgaagctgaagcactgcatggtggctcctgttcagggctcttggcagtgagttctgaaagagggaactgctgaggctccacaaaggacaaaacagctc

SEQ ID NO: 483538 - DNA, 1000 bp, Homo Sapiens
gaattccttaagttttatattaaaaactgggtaaaggtaaaatgacttgattgtagttgtaaaactaatacattcccatttaagttctgttctacagtccaaggcaagtataaatgttaacataacactgttaaatcaaatctcaatgcaggagaaccaattgcatctctactttaaatcttatcaactttccaaattttcatactaaaatatattattgtattaatacaaactacagtattatacactacactgtgtaataaataaagaaatataaaaataagacacataaatataaaagttttctaaaactaaaagtacatatgtcagtaagaagggtattcctacggccaggtttgaagacatcagtcaaaatgttgcacagatctataaactaaaataaataaaataatactgataggtaaaaatcagctaatgttgttaataaattgggtccataataactaacatttgggaaacagttatgagccaaataacaatagcatgtccatgtctgaaatgcaagtacatgataaagcagattagaaaatttccctttcgtttctgtagagaaattctgaaaatcaatcaacataaaatcaataccgaggaattgaaggatgaaatgtcccagtgtttcagtttctctgacagagtcagtggttttaagttttatttgggaattttgatacaagagacaaatcaacaaatgctagttattgtaggccacacattggattgaaggcgggttagagccttgaaaatactgagaaatggcacttacagcacacaggtcttgcttaaggccaaaggagatacaaagcttcatgtcatatccttcatatgttaccacatattcaaacacaatcacaaacactgattctgatgattttgctgtccttatcagattaacattgttagtcccctgcaatcagaactcaaggcaatcttttgaactccattttaaaccacgtgagtaagaaacttcagttcttctatc

SEQ ID NO: 483539 - DNA, 704 bp, Homo Sapiens
tttctccttgccacagtccccctttaccattcaatgcatgtggctcaattttcatggcattttttttctaaagcacaaatactttccacaacttactaatgaaataaaggaaatgcattaaaagtaaaacacataaaaacatttcaggaactgtctaaagttaaagctgttaaaaaaaagttttcacagtttagaacttgccatatgaggttattagaaaacactcagaaagattccaaggtaagatgtgaagcgcacaaacacacactcaagtatgcacacacaactaaaaccaacagagagtaacacaacagcccggacggacaagtgttgagtacctgctccgcgcccgcaaaagcgtggtagaagcaagagacgtacgtcatgatggctctttcatcgggtttaggggtgttcacgatgtctgaagggggagaaaataacacaggacgcgcgcacacacacacaccacacacatacagacgaaggagagaaaccagggagaacagagggaagaacaaattggtttacactgaccagatttctgtgtttcatgggcccgtggtcccgaacctcaggaaggccatattgtatcgaaatgattcgtgaacaggatggtttgagccagcatgttttttaaggatcaaactgagggcttgttttctcccccaccccttgatgggcttttaaaggtgcttctcagc

SEQ ID NO: 483540 - DNA, 853 bp, Homo Sapiens
aaaaagaaaaatatatatatatatatatatatacccccacggagtagtttttcaccctctgtgcctcagcccctgcgtgaggatggacagaactgcaggtcaccagtttcctttacctcactcgctagcctctcatattcttccatcagcctctcattctcttgattcacagcaagaaccttacatatcctgttagccgctgtctcggcctgtaaaacacaataggtaaacaggacggctctgtcgacgggaatgcgcacacacagcatggaacgaggtgggtgatgagaggggacgaggagggtggcgtgctgtagacggtgcagagtctagcttagggtgcggtcagactgaaggcatggcttatgcgtactatgaatcatttcacacctttgttacagttttcacacagacttacacggcaggctgattagactgtagggaataacggggagagagcattagtctaaaacacaaactcggtaaacatccagcaagttagtcacagaaatatttgggtccaggaaaccaagatcttgggtccctgaatgtccacctgaactctccactgatctcatgacgatgggatggagactccctgaataacattagtctttggaaatcaaggcaaaaataactggggcaggaaaatccagatataccattgcacttgaattcactgaagacctcctcatctcctgatatgaacatgtagaactttctggaggggatccttccacagagctggagtgtgctttaagactttgtctaacctagatgaagaagtcattgaggtaatacacaattctctgtcatctttcgtggaaaggaacttggggcaaggagtggcaaa

SEQ ID NO: 483541 - DNA, 1000 bp, Homo Sapiens
ggaccttgcccccttcatgcctcccaggagacacctagcccctgctctgtgcatgcgggtgggctgggcccccaggggtgcaaggatggagtagctgaggaggctccgggagaggagtcgggaggacgcgctagtgggacatggcgggggtggggcagggtgcggtcaagtttggaagaactgttggtccatgtgggtgctaagggttccgctggtggtcagtgtccggctcacaaactcctgggtcacatgccgggtgagggagccgcctgcctccaggtgctgggcccccagggtcggcccatctgtggaggaggaggcattaaatgacctggcttggggtctgcccttctccctctgctagctccctgtcccaggagagccgggatcccctagccctcagtgctcacccactaggaagggctcggtggcgctggtgtgggtggtggagatgctgctgtactcgctttgcagcgggtgctggaagagcccggcacggctgcccagctgcgggaagggtcctggggtgggcagataggccagtcagagggtggtgccagaaggaggcacggcccgaggaggggtgggggtgaaggaaaggacaggtgcctacctccatcctgggactctatggtgatgatgccctcgcgctctggcccgaagccctcagtggtcctggcctgcaccttgaacttgtagggcacgttctcgctgaggcccggcacggtcagccggctctcggggctgtctccatccacccggaatgcggtggctggccctgagcagggaagatgccttcagcctatgcggccccctctttacccctcccctggtcactcctgcccccggggtgggcagcacctcctccttgggccatctcacaggtcaccaggtagccgacgatatccccattgggcctccgtggccgctcccagctcagctgcagcgagtctgggctcagggcagtgaacaccagcgggcctggggcactgggagtgct

SEQ ID NO: 483542 - DNA, 1000 bp, Homo Sapiens
acataaaacagctaaaaatttggcctctttattgatcttatgtcatgtatttggcttgaaaaaaaaacaacaacaaaacaaacagttacaagggttaaacaaactaaatttttcttctaaatctctaaatgctcatagacagccaacttgcagggcatacacagtgccttgagagtcggtcccacagaaaatacttatgtaaatgaaacaagaaggatgctatttgtttttcattacataaacattacctgaacttaactaatcaatccacttatttgataaaaatcatctaggaccaaaagcactatcaagtttgctggctgccattttcactctaatcatacccaaaaggcttagaaataattcaaaactagaaagaggcccaagtagtaaggctacctatggctcttgctacaaaacagttgccagtctgatgtgtgtgtgtctagaaagaatgatagaaaataaagagttcttgagttcaagagaacttcccagaaggaggtggtgggccaagaaatccacctgcctgcttggtggcggctcgtgaaggggcaaggccgagaatcttctgaatgttctgtcgaatcgacatagtacagagaatatacaggaaaatgaaggaacagtctgtggtgtcatctcccagcagatttcgatgagacagtccttggatgtaagaaagaggggtaaaaggaagctttgccaccactctaccatcaaatatggaattgaacattcccattagggcagtaaaacaaaagccaatagcaaacatggatttcattcgaaccattgatagatctctgttgttattcttcagtttctcttcttgtctctctattttctttttctgttgtcgaccagctgactctgttattgtttccttcttcttttccaattttttactctgtttttccacttctgccttcagtctcttgtacttgtctgtcctgtaaaccaggacccaggttatgccctctgcgagcagagccgtgca

SEQ ID NO: 483543 - DNA, 1000 bp, Homo Sapiens
cactattagggttattatgttgactattttcattgctgtcttagcactgcacggcagtgtgcagattgccgatcttatattaatattttgttttgaggcagtgcattagcattacaggtgcttgttacatgagcaatggggtgtgttatattttcggtgtcatgtctgcatttgtaatgctgcatttgtgttccaacgctacggtgtggatctcccactgctgccgcctcaccttggctggggagaatctcggtgcgcaggattcagaggggcttttgatttcccgttttccacactgaacccttctaactgttctctgaccctgaatattcagcgctgcaaacagaaaggattgtattcaccatcaatgaagccccgagtcgtgccaaagcgaggcagtgcccccaaggtctgtgctgaggagaacggtgctctgccttcgtggtgtctcctgggtctgtggtgagcagaacgccgctccaacctcgcggagcccccgtcccacccaaccgcccgcgtctgtgctgaggagaatgctgcttcgcctccgcggtaccccaaaaggctgtgcagaggagaacgcagctccgccctcgcaaaggccccccgcgccggcgcaggcgcagagaagatctatggcaagtaaacgtgcaaaaagatgctcaacatactagagaattgaaaaccacaatgagatagcacagctactctatagctcttagaactgctaagctctttaaaaaatgacaaattgctgcaggaaaaacaagaactcttttcgttgcctgtggaacacagtgtataagaccaaaatatgccaccccaaaatataatggtaggtaaccagaatatgctgtcccaaaatatgtccctttggcttaagaattattccaagctattttttaaaaaatgctaacaaagttctgaaaacacagtagaagttacccttgtgtaaggaaaatttacatctataaaggaaatccccatttaaaagctacct

SEQ ID NO: 483544 - DNA, 1000 bp, Homo Sapiens
  misc_feature (582)..(582): n is a, c, g, or t
atcttcgacaggcccatgtttaaaaaggtcacagagaggttaatgatgagccgcggaatttcgagatgtaaatagcctgctgcagaagctgggtctgctttggcccaactgtgggagtgtttgtacaacttcaccccatttcacagcaaccaatccggctttaacccctcccctccagccctccagccctccagccctgaggctgacagacactgggctgaagaggacccagttcgggacacacctctgcaagggtaggaaggagggcacacttacccagtggcttgtactcgtcgcgaggagacagccgagagtagggaggtggcggagattctggaagacaggagacagcatgtcactgccagggttggggagctcacacctcaggttctacatgcttttaattactggtttcccaaataataaactcagcctccaggaagccctccctttgtcccacctcctctgctgcccaaatcccctcaacagttaaagccacaggcttggggcacagacagatatgggctcaatcccagctctgccacctttggctgtgtgacctcaagcaacttacttcacctntctgagcctgtttcctcagctctaaaatgaggataataatcatctagacctcccaggtttgctgggataatgtatgtaaaatgcttagtgcagctcttggccctgtccaaaaacacctccataaacagtaactgttactactttaacaagagaaacgtgagtgcagggaaagtcagagccagggttgctggataaaataccggatgctcagttacatttgagttttggataaacatggcatcattttgtagtataagtgtgtccctttcaatattgggggtgtacttatactaaaatatggtgtgttgtttatctgatactcgaatttcactgggcatcctgcattttatttgctaaatttggcaagcctagtgtgagtgcaaaggcccagacacagaaactcgtgtccaaacaagct

SEQ ID NO: 483545 - DNA, 1000 bp, Homo Sapiens
gtcctaatgttcatgggtgttcaaatttgtaggcaaaaggcttgtacagacaaaacacctggagtataagacatgatcacgtggtcaggagcaaaatattgggcactgacgataaatacgaacagtaggcaaagatggaaaaggggcggagcccgcctgagtaccccattgccttgataacctcaggatcatcactgcgacactcatcacttactgatgctctagttttccttttcactgtcatgtttaatacaaagcaccagttactgagcacctcaagaggccgacatgccccacacctgctgcagactccggggaacctaggcaaagccaggggcgggcgcttccggggtccgttcgtggagggtcgcagacccatgctctctcggactcctgatccgctgccgcctctgccaacccaaaggaggcctcacctgctagccccggtgatcaaaaccacctttcgcatcttcgcgcactcacacttccaagcagtgaagcaaacgccaccgctgctttcggaagtcctacgatttcgggccgcctcacccgtcaccaatcagagtacggccacgccccgcctcccgttgcgtcatcgagtctgagctgatccctccaatctcagtccgccaaccgttccctgccctcggagacggcgtcgggtgagataggccgaggggcggagctgcgtgacgcaaagcccggagccattccaggctcttctcgctccgcctaggcgcaggtgtctgtcactgcttcctagggctcagcgggcgcctgatctttaatcctggtgggggcgtcacccggcctagcactcaggacaggatctgtgacacgcactgggtctgtgccctggcgcctgagattggcacttctttgtaggaaggcctcacggtatttgcaccagtgcccattttagagaaaaggtttgggtctaggagccaaagttgggcgattatcatctaattttccactcctttttggatgtacagatcca

SEQ ID NO: 483546 - DNA, 1000 bp, Homo Sapiens
  misc_feature (843)..(843): n is a, c, g, or t
cccccccctgggaagaattttttggccattctggcaccatttttgaaatttcccaaagccttttttttgggggacctgcaaaccgcaaaatatattgtatgaccgtaagataagggtggccaggggagacttaaaattggagggagcaagccaacgccaatatttatggggaagaacattttaaacagatacatgcagcaagcaggaaggcctgaggcaggaatgtgcctgtgtgtttgaggaacagataggagcccattgcagttggagtagagtgatttggtgtagagcgagtaacaggagaggagagcagagaagaaatggagggccagataatatagtgccatgtgggccatggtaaggattcggggttttactccaagttagctgggaagccagcttttagcactataatccctttatttaaaaatctggaccttctcaccagccctaccccaaagaatttagttacctgccctcacaaactctgccttgatggtggctgccttcaggctagtcttgggcattgtgagtacaatgggggcaaacttgacctttgtgatcttcaggatgcttttgccatcagggcacaagccagggattcggaatctcccatcactgtctgtctgggtcagcagcttcggcgtcttggtcaggaggtagatagcagcccctgaggctggggcacctccgggaagggagacagccccatgaagcatgaagtcctggcacatgcaggcatcacagtcagcattcacctggcccattgggcaggtcaggtcacaggctgtggaacaaggggccatatcagcagggattctatggattctggcattccttcanccacatcacagatcacttcctctcctccttggcctttgctaccctcccttatcagcctgcatgactaactcccactcatcctttaaaattatcccaccgccaggcgtggtggctcacacctgtaatcccagggactttgggaggccaaggtgggtgt

SEQ ID NO: 483547 - DNA, 1000 bp, Homo Sapiens; identical to SEQ ID NO: 309778

SEQ ID NO: 483548 - DNA, 1000 bp, Homo Sapiens
  misc_feature (112)..(112): n is a, c, g, or t
ctcgaggatctcctgtttactagacaggcgctttaaccagctaagccacggcgccggcgtaaaacaggtgtgcctcaagataaatcaactcttagtgggtgacagtaagtgnaaaatcagcaaactgcctgcagtggttcctcagtgactcatcccttcctaaggtgcctcttccctttcaggttctgagccaaagggttaatgctttgcttctccattcttccacacctttggggccaactcaaccatgagtgagcacatgactccatgtgtcccttagctacctagactgacctgctgaagggccctctctgtgtggtgaccaagaagccaaggaaggccgggcgcggtggctcacgcctgtaatcccagcactttgggaggccaaggcgggcagatcacctaaggtcaggagtccgcgaccagcctgaccaaaaatggtgaaaccccatcgctactaaaaatacaaaattagccgggcgcggtggtgggcacctataatcccagctactcgggaggctgaggcaggagaatcgcttgaacccgggaggcagacgttgcagcgagccgagattgcaccattgcactccagctgggtgacagagcgaaattccgtctcaaataaaaaaaaggaagccaaggaagacaaacaccctcgaatacctcagggcaccacggagttaagcagggttcctctgccttggccacccgtgacccgggctggagcttacccaagcccttggccacacgcacctctcagctctccttcccagggcaaacccagctgaggccatgctagaggggacagcagagtctgagctggacgtggacgtagcgggctcagcagggccctcacctggacaggatgggggaaaagaggaatgggggtcgtcaggagatggccctgtacaccctcactacaaccttcccaaaagcagggccacatctccccttgacatgctcccttcaccccaaccccaaacttcattccacaaagtcc

SEQ ID NO: 483549 - DNA, 1000 bp, Homo Sapiens
ttttttttttttttttatgttctatgacaatgacatttatttaacacgttatttcacattgtacaaatccttagattctctttattcactggtccatttctacaacaaatacatccaaaacactatataataaaattatttacaacatttccaaatgagaagattgcttttgcccccactactgctattcacacacagtacttccacggcacaatacatcattaggagatctaaaaatgctcaccctgtactctaggctgcttaggaaatgtgaaaactagtaacatttataatggcattagctcctttcaatacaagacaacattttagaaaccttgaacttcaactcgcaacaccaaaagggctcaacagtcctgctttccccattgcactttatgaaacaggttgcagggactaggaaaagggccacattattaaaattactaactgtacagaaattgatttaaaaaagtcacagctcaaaattgctctttgtaaaagtcacacacatttccaagtatcaagtcgcagtcctgcttgtttacttggattttcttcgcttggattgcaccgcactggttatgtctttagtagagctggaggctgaagcaggtcgagaagatcgtttacgatgtccattttccacactttcagaggccacagttggctcttcagttcgggagtttcttcggcctgggattttggacttttcaactatctctttgggctcactgctttgtccagagactatggcagcatttacctccagctctggtctggcaacagaggcctgcagtgctgtggttgaagtttcctttgagactaaattctgcgacggggctatgctgggtagaagttctggatgggatcccaccttctcctccactaggccacccgcaagtgactcagatgctatgccaccatgattgctttttgtggtcggtacggcggagatgagctcggagggtaccagagtggttactatcgagcgtacactggt

SEQ ID NO: 483550 - DNA, 1000 bp, Homo Sapiens
aagggtgtggtttttgtaagaaaagtccatgtggaactccaaacagccactcaacagaaagagggcttagccctgcgttcaaagactgcctgctctggaaacttattttaagcaggttagaaaaacttcagggtaccatacactgcctgtggggagaaattagctattatgcaatgtgatactcaactcactgcccacacaactcatctctgtttgactcatctaaaatgagaaaccaagttgttagttctccaaaataatgatgaaactgagttcttatctacttcttcaaatacagaagtaataatacaagaccttttgtaatacctgggtgggaaaacttttactggaaggggccaaatgccttaggcattgcaggcccctgtggtaaccactaactctgctattgcagctmaaaagctgtcatagacactacctaaatgaataggcatggctgtgttccagtaaaatctatttacaaaagaaaggctctgggccacattgggccagtaagccatagtttgttgacctctcttctaatgtaataataatttaaaagcccaaagcaaacatccatgattaaatagcatctatagcataaagaaaaacttccttacctggccaagagactcctgcagatgtacctgtaaatattctgggggtaaaccaggaatattcagagaggcttgtgagagtgggggtaccgaacgggtaagtgaggactcaaagtcttcaattacaacattggattggttgctgttcactgcattttgcttcaaaacctcagaatcctttcttcctgaatcatcgaatctcagaagctcgacttgagattcaatgtgtagcagctctgacttcacaaggtctgtcctcaaggatgcaggtgatgccaccgggagtgcgccacttatctcctcttgtcctctgcttgacctaaaatgctttctgagggctggccagagtccagcaatccacggctcaaccacaagttctaaactgg

SEQ ID NO: 483551 - DNA, 1000 bp, Homo Sapiens
tctgtgggagagagaatgcgtgttgaggcaggggcccggcacctcccgctccacctgtgatggagcatctcccgaaatcagggcccggggactctcagcgtaggcacagcaaccccagggacaagggacgccctgcttgccttggcccgaggcagccgcctggagcagcatctccatggccctggccttctgccgcgtctccaggtccaggtccctgcggtacagcttcacccactgctgcagcgtctccagcgggctgaggccctgtgtggcatcagttgagcaggggcacagcagcccccataacctcgcccttgccctctgccccaccaggctcacctttcgagtgcggagggtgacggacgccccccgttcaagcagcagctcagccacctcgaagtggccacagttgagggcatcgtggaggggggtgatgccttcgcagccctggccacctgggtcgtccactgcggccccgtggtccagcaggaagcggacaatttctgcagaccaggagacgtaagcccagctcccgatgccccgccaggactgactcttcgccccacgtgtccaccaaggtgcgccaggctccttctgtcccttgctcacctagatgcccgtagttgcaggcctcgtgcagaggtgtccagccacagtagtcccgagggttaagggggtggccctgtgaccaaggacaggaaggagcctggccctgtgtacctcacagcctggccccagccccgtgagctctgcagcctaagctgagcccagggcctcagtcttagagcccagagcaagtccgtggccctgccctctcctcctccggcctaggtgtcaccagtgaaggacatgcttccccctgagacaggtggaccagccacagcatatcctccgcctctgtgcctgcccggtccccttgtggggagacagtgcacctggtcgcaggggcatgaggcaggcggggcaggaaggtgcccagatctcagcccatgggctagcc

SEQ ID NO: 483552 - DNA, 1000 bp, Homo Sapiens; identical to SEQ ID NO: 309783

SEQ ID NO: 483553 - DNA, 1000 bp, Homo Sapiens; identical to SEQ ID NO: 120130

SEQ ID NO: 483554 - DNA, 1000 bp, Homo Sapiens; identical to SEQ ID NO: 309785

SEQ ID NO: 483555 - DNA, 1000 bp, Homo Sapiens; identical to SEQ ID NO: 309786

SEQ ID NO: 483556 - DNA, 1000 bp, Homo Sapiens; identical to SEQ ID NO: 120131

SEQ ID NO: 483557 - DNA, 1000 bp, Homo Sapiens; identical to SEQ ID NO: 309789

SEQ ID NO: 483558 - DNA, 1000 bp, Homo Sapiens; identical to SEQ ID NO: 309790

SEQ ID NO: 483559 - DNA, 1000 bp, Homo Sapiens; identical to SEQ ID NO: 309792

SEQ ID NO: 483560 - DNA, 1000 bp, Homo Sapiens
tcaggaagagccaggaccatccccctgggcaaggcaggggtcaggggatcagcaggaggcaacaggaggcttggaggagggggagtcgctgaggacccggaagtgggaagggccaggataggggaagggaggaagggaggagaagggagagcagaggaaggtgggaacatagaatcccagggggtagtggtgcgcagtaaaggggcacctcatcctgaaatcactgctgatcaatcgctggcctcaaggccacgccaagggcaggagcctttggccagggtcagtccagggtgtgagaagatcagagcagacaagcccgggggagggtgcgagctgacatccaggcccttccagcgctggccttctgacaacagcctttcccaagcccagatggaagagcggacggatgcgggagcacgaagaatcccggaatctaattttagcccagagttccccgcctcccctgctgacagtgagcagagcctgggagggtggtagccttgcaccccctgccaggggtcctgctctcgtggaagggccagccaacagggagagctgccaagagtggctggggtcagcaggtgaggctcccaagctcacacagggcaggggcgttgctggactgggaaggacccagagcctgagctctggtgctggaggcagggctggtgaagaggcagaggttgatgctggaggcagggctgttgaggaggcagagtgaggccagtgggtgacaccactgagatgagactgggtacgtttatgtcctggttctggataacctcagccaattgcctctgcctcagtttccttgcctgtgaaataggcatagtaatcacatcaatttcagatgatgcgtatccggccctagaccctaatgtcttaggactgtcatgattgctttcaccacggcatatctcagagggccccaaactgatctgttactccagaactggtgcttaactttgtgctgaggtacaaaggtgaggaaaacaccacc

SEQ ID NO: 483561 - DNA, 1000 bp, Homo Sapiens
atcaagtaatagaatatgggacctcttaaggtgcagatggcaaccacagtttctcatctctttattttttttgagacggagtctcactcttgcccagggtgaagtgcagtggtgtgatcttggctcactgcaacctccacgtcctgggttcaaacgattctcatgcctcagcctcctgagcagctggggttacaggcgcatgccaccaagcccagctaattttttattttttttcgagatggagtcttgcgctgtcacccaggctggagtgcagtggcgcaatcttggctcactgcaacctccgcctcccgggttcaagtgattctcctgcctcagcctcctgagtagctgggactacaggtgcctgccaccacgcctggctaatttttgtatttttagtagagatggggtttcaacatattggccaggctggtctcaaactcctgaccttgtaatccaccagcctcagcctcccaaagtgctgggattagaggcatgagccaccgcacccggcctcatttttgtatttttagtacaggcggggttttgccatattggccaggctggtcttgaacttctgacctcagatgatccgcctgccctggcctcccaaagtgctgggattataggcatgagccactacaactcgcttcatctctcactttttaataaacgtattcttcacaccccgtgttcagcattaccctagaacagtacttgctgcaacattcaagttttccatctgcttaatccaatgcagtgggcagcagctacaaatggcagctaccggacacatgaaacctgaagcttgagaaaccgaggagtggaattcattcatttaaatcgggtcctgaggtcttcttgatgcccttctgccttcctgcccagagctcccatttaatccttctttcacctgctttccccaggaagagaccctgggaagagaacatctcttcccaggatggtcacctttaccctgaagtccttctggtctgaatat

SEQ ID NO: 483562 - DNA, 1000 bp, Homo Sapiens
cccaccagcaggacacaaaccaaggcaaagatggtgatgacggccagaatgaggagcacgaggattgtcttctggttcattttcccacgaagagggacagctgattcaaccaaaggagagcaatgtattctcacgccagcaagacgggggctctgttggctcctggacggggtggggggctcccggactctggctgaggttcccggtagtcagatgcctgggactaagggtgggaaggacacaggaaggctagggcaagggggcggggtggccggggttggaggcgggtctgaacagctgtgatttccacagaccttacatggttttgtcttccagcctccaaatcactctactttctgggtcagggttggagttggggagagttggggctagggggaaggggaaggaaaatttcaagataatgcagcactgggaaggagcaggatctgtgcagagcagcctctcctgacctcagcccagcttcttccccagtcccccacttagtcagggccagatattttcctgtaacttcaaactatcgttttccttccaaagacccccaccccctgcccctttagctttccaaatgacattccttggccaggtctatcccccttgccctctggcccccagcgctaatttccctggccagactccttagtattctccagaggactctagatacttaacaggtcaaacaataaattcaagtaaaattcctctaatactttttattataaattacatacaacatctgttttacaaaattctatctactcttccttttgaatgcacatgcataaagagatgtctgatgtaatgtgaccacctatttctgagtagtaggatttgtgatatttttctttgaatatttaaaaatcatttttataatttaacactttagagatgaacaggaagtaagaattaaccaaagggactgatgggggtttcgtgtgagaggaacattgagggggtgggaatctggggagcaggtgtgata

SEQ ID NO: 483563 - DNA, 1000 bp, Homo Sapiens; identical to SEQ ID NO: 309793

SEQ ID NO: 483564 - DNA, 1000 bp, Homo Sapiens
aggaaataaggcccagaactcagtggacaaaggtccaggtgggctgcccaccccaggttccacatcaacccgcactctgggaaccacatcgccttccacctcaatccccgttttgatgagaacgctgtggtccacaacacccagatcaacaactcttgggggtctgatgagaggggcacagctggggagaggtggggagtgggcagtgaagatgaagccccatgctcagtcccctcccatcccccacgcagctccaccccagtctcaagccaccagctgtccactcctggtgggaggtgacgtcctcagtccctcccctctgacctttaacctaactctcaccttgcaccctgcatcaacccttcaccccctcctggaaagccagcctgatggcatcccactggcctccaccaactgaccagagtgttctcttcaggggactggctcctttcccagtgtccttaaaataaagaaatgaaaatgcttgttggcacattcatgtgggttgaccgtggcttctttaattcatttggagacattttggagtctgtggaatcgggcggcggtgctgctgagaggagtgggatgggaaagcatggactccctttgggcagggggtcctgacctcacacctcctcccagagggtccctcacaaatcccacgagggtgttggagaaagcaggctggggctctagccttttgggcaggagtctcggacacaggaaggtggtaatggggtaccccaggaaacagccccatgcctccgagatgggagaggggctggggcagagcctgtgagggccacagcagggtcagagctgcctcctcagacctggcgtcccagtgggaggaggtggcttggggaggggggtcaggagaagccaacccgaagcaccgtctgggtgtgtgttccattgtgggtctctccggcattaggggttagggcttgcataggaaaagtggctcagtgttcatgtgttgggttctgccagccactgg

SEQ ID NO: 483565 - DNA, 1000 bp, Homo Sapiens; identical to SEQ ID NO: 309794

SEQ ID NO: 483566 - DNA, 1000 bp, Homo Sapiens
tgacatagtaatcctcccatcagctctgaggtgcaattacctctgtgccccttcacctgggacccaacctaggtgctcctgagaactcaagcctcaggtgcttctcttatttcctcctccttccccaccttacagttttaattgcaatcgtgaccttgcaatcatgaccttttttttttttcttttaaagatggggtctcactctttctctctgggcttttggttgttttgagacaggatcttgttctgttgcccaggctggagtgcaatggcacgatgttagctcactgtaccttcacaactctgggctcaagcgatcctcctgcctcagcctcctgagtagctgggactacaggcgtgcagtaccaccctgcctaatttttattttttagagacagtcttactatgttgtccaggctggtctagaactcttggcttcaagcactcctcctgcttcaaccccccaaagtgctgggattgtaggtatgagccactgcgcccggccctaagacctctgtctttatggatgtgagtcagcctgtgtccagcaacctacaccagtgtacccacatggcccagcacgggcctgagcaaagatgactcctgaaagccagcaaatggcaggtgcctgaggcttccttccacaaacaccagggcctgggccagtgacaggtggttgctttgaactttatttgagaaaaacagaagataaatgtatcaaaagaacacacaggtggcgggggaggcacagccagtggcggcagcaggggtgggcatccgggctaaggctttacttggcggcagtctcatcggattttgcagcttctgcccccaagctgggcccgcgactcgaaggtgactgggatggtgatctcgttggactgcgtggctagcttgggcatgggggcctccacggtcagtgtgccctcaggggacagggaggaggaaacttgggtggggtccacaccggggggcagcctggacgtgcagagaggaaagg

SEQ ID NO: 483567 - DNA, 1000 bp, Homo Sapiens; identical to SEQ ID NO: 120132

SEQ ID NO: 483568 - DNA, 1000 bp, Homo Sapiens; identical to SEQ ID NO: 309796

SEQ ID NO: 483569 - DNA, 137 bp, Homo Sapiens
ctattaatatatactgaggaaaatacatacccacagtgccaacctaaactccaaatgcaaactgggaaggcagtggaaagaagacacaaagcttcacagcatccaaactcagaagaaagaaacaataaaatcacacc

SEQ ID NO: 483570 - DNA, 1000 bp, Homo Sapiens
agtgactcccacatttctctgggttagaaaccctgcaagagtgagcatggcctttgatccagaaaaataaatcctgccacagtatgtgtgcctggaaatttttaggatcctgtcttccatttaagtctctcaaagccatttaggactaacttgcctgaatcaataatcctgtgtagacacaccctcagttataaaaccaacttctttaaagcaagaaattatcaatagaacaggcaatatggcattaatattagatcacttcatgcagataggagcaattttaccaggactgtcgtattttaaaaactagtgtacatgcacatatatccacatacaaaaattccataccttcaacttggaaagacatcttattctatgggtttcaattcttttctcagtttctcccatgttgctcttcagggtgttccaagctatttatgttttaaatcttgatatgtcttacttctaccctttcaagcaaacaaaaaaatatgttaaattaactacaaaattgtaaagcatcattcttttgaagtaagtgctgaaaatgaacaacataattgaaatccattgcattacaaaaatacctggaacgctttaatacagattagaaaatcatggtgttagagaagatttagttgttggttttctatttcaaaaggtacatcaaataactttagtgactctttagtgagattaaagatattagaattgtttgttatgatcttgcaaaataatggtcacatggttaaaagaaagcttttcacttctctagccaaaacaaatagtaccaaaagacttccatgaaaatagctacttttaataacacacatactttgagttgtgtttgtactaaaaacctgcttcactaaccctaccaaggctcaaaaatctttttttggccaggctctcttttcaagttatttgcattccaaggcttccctagagtctcaggaagggaaacactttctggggcactgctgatacatggaaacctggg

SEQ ID NO: 483571 - DNA, 1000 bp, Homo Sapiens; identical to SEQ ID NO: 309798

SEQ ID NO: 483572 - DNA, 1000 bp, Homo Sapiens
cgtgtttcagacacggacttggggtgggcaaggggccctgtaagagggcttcctcctctcagtactggggctctgcgtctcacctgctcccatctccaggcccacggctgacacggtatgcacagccagggtttccagactgctctcctgctctcacagaactctgtctgctctctggactctgcccttgaaactgagacctggacatgggggagacagtcgtttccttcttggctggaaactaagtcaacaaatgaaacaaacctagtctaaattccaggataatagtaaattacctggtttataaaaatacatgtccaaaatagttacttcctgggttgtgtacaatataaattacaaaaataaaatagaaaagatgaaacagttgagcacatttttcagttctttaaccaacatcagcatttatccatagagatcagtttgaaaccatttgcgtggcaccaagaccctggcaaatctaggctcaggagagagaaccctgaagctggggtgaggtatttctgtggagccctgtggcctgtcctaggcacgctcgcctctacctggtggaagatggcctttccaggaaaccctccacaccgtcacgggctccatctgtggcaagtggctcgctgaatgcacagaggagcgagtgagcagaagggcgtctgcgggtgcctcgtcccccgtccacgtctcccggggagggagcatcacacagtgcagggcagctcgcgcattttcaacctctcccttttgtttttccttttaaagatagatttagtgaagtcttttaaaagaaagtgtattacagagaaggccattttaagatgtttagatagatagccataaaataggtgtttctgcctcaatccaagttattattaccattttgtacttgaaagtgtccaaatgacacaatataaaagaactatttcttatttcaatattaattttgctaatcaaaggttccagtttccagtgatatgaccaaccaata

SEQ ID NO: 483573 - DNA, 1000 bp, Homo Sapiens
tttagtcatataactatttttttcttttatttttataaattttttttttgtagagacagggtctcaccatgttgctcaggctggtctcgaactcctggcctcaagtgatcctcctgccttggccttccaaagtgctgggattataggcgtgagccaccatgcctggcccaccaatatatctattcttatttcaataggaatatctagttactttgtttctacaaatgagtttgtacctcgtaggtacaatgagttgtaccttggcttcttactggggaggacgtggtaaaaaaaaatgagacgttttagactctttgagggttggaaattttacccagaacatgaaagaacatactagggacaggaattcaaaagatgatgatagagaataatactttatttgccaaaacaaactttgggccttataattaattaatactgtataatccttataatggggaaagcaatagtatcaaacttcaagcttctaaagggaatttggtattactccagttaaaaaaaaaaaaatccatgttttttgtaccacagcagggtcagagcagcagccaaactctgaaatggctttcagagttcatgatgaatgctaacctacttaccaaacaggcacttcagctactcactgtcagcaggccacatcctgttcagtgtgatgactaaatgtagagtgaggaaaaggtggagagcagacagttctatattcatgactacagccttttccttctacatgcttgacctccaaacctcccatgaaaaaaaagtccaaggctatcttttctttttcattcagttgaccaaaatcacaagggggcatcccttaagacaacagaaccaacttccccttcatctagtaggattaatgtccttgcttaagccacaaacaagatgttaactgccttatatttcatatgcaagtgaaatatgagtcatccactgattcacgtagcaacgcaaaacatcttctcttcatcctcttggtact

SEQ ID NO: 483574 - DNA, 1000 bp, Homo Sapiens
tacttttgtaaagtggtctttattgatttaacataaaacttatagaatactccagagaaaacatgtgatataaatgtcattgttagagccatcaaaataattcttattttcattaataatttgtggaggaaattattgagaaatgttgattctcttatcagagctcaggaggagttaatggtgctaactgggggtggtggaaatagtcccgtgagaagcaaaggagccaaatctacctcctcacactgatttggtcacctcctttatattcccaagtataacactctacacagacaatgagagagctcaatgcatgtacagaatccccggttatttatgcagtccattggatgaagcccatcttcatttcagagttctattcacaaagtaatttgaggtctctggtgttctcaggcacagatttcttgaagagcaaagcagaagtccttaggaaaattcaggctccacttacggtgccatcccttgactcaacctttagaacaacgggtttttctggttgaagaagtcctcctaagcttaatttcagggggatctgcaacagttaaacaagcatattgagaagcattaaataaacaaaagtagaaagtatagcatcaaagtgagtgagacactccttcagtgttgaggggacacaacagagtgatattctgatctctatggagtaatgggcaaaaaaaatgcagtaatgacaataatgctttgtaaacatataaaaactactttcagcactataaatcttggattctttatacttagtctataagatgtgtgaagattggacagtgagagcattcatcatctatcatttaacaaaatatttatggagtactattctgtgccaggcctgagacaaattcatggaaacctgtgttcttttttgatttaaattttaagtaaaatggatgagtttttaaaatttaaaccagattattaggtatgatggcaaactgtttttgaagagtcatataaagttaatttt

SEQ ID NO: 483575 - DNA, 331 bp, Homo Sapiens
agggtcttggggagaggtgggtgctatggaggtgctgggattgcctccaatgcctgggcaggagaatcaccatgtatgcccttgagagcagcataagtactacacaggagacatacttggataatgtcacagtgagaaacactcccctgattgtggagttcatgggggaaagtggcagtatttactgacattctgtagcttgatatgggtcgtgttggaagaatgcacagagaaaaagattggccaactactgaaggacaaattgaagcacacccaaaagaagaaaacatgcaaaatgtaatttgtggatttatgtttaaaccttgccaac

SEQ ID NO: 483576 - DNA, 1000 bp, Homo Sapiens
ggatcctatagaatagtgagtgcaattaaagacattcagtgttatgttcattttgactctttattcctcggaatgaagactgtgagctaaaatgtctgtaacaatgtaggatgtttgtaaaaatattgtttctcatgtgagcttccaagagggtcagagtgtctgattataaaatctctgaaactaaactgaaaatgccagcatctatacatatgtactacatattacatacatctttagatgtatatttatgtattttatgttttatatattaaatacgcatatgcaagataacacattttagtcgacaccattgaaaacagttttaaccaagaatattagaaccaatgaagcagagaaatcaaaagggtggatggaactgccaaaggatgaaattcttgtgctatactctcatgctctcatctagagaatgtgaatatgagaaaacatgggtcattcgttttaacatgttaagaccgtgcagtctgtccttcatgtccatggcaatagagggtgaagaacagctggagaacaaacaagaccccaatcccctcagttgggtatgatctaatggttctcacctaatcaagaacaatagaactagagataaaaaggagctgcaagattttaaaagttaaccagcattagtaaaagataactgtcatgcacatttaaagataaggtttacataacctcataacctccgaactgtaactaagctcatagtcatcaaaagttaattcctaggaagaatttgattataacagtctgttccattataaacacactgttttttagccaattccaaggagattagaggtaggtttcaccaatcatgcatggcaggatcagaggggatgcaaagtcctggaaactgacctaaaatactgccagtaaaatagtgggtagttgtgggtgccctgctcttatgaacatctgctgaacccttccttggtctgattctaacccagggtacagaagccctgacactctggtaagt

SEQ ID NO: 483577 - DNA, 1000 bp, Homo Sapiens; identical to SEQ ID NO: 309802

SEQ ID NO: 483578 - DNA, 1000 bp, Homo Sapiens; identical to SEQ ID NO: 309803

SEQ ID NO: 483579 - DNA, 1000 bp, Homo Sapiens
tttttttttttttttaggaaattaatacaatatttagcttttgtttctaggctactaatttgaatataatgaaagtaatttccatcagacattcttaagtccatatggaactctgccactttgcaagtacaagattagttacttaatattttgtggataacttgtaggaggcaaaaaggtgggataagaggatgaggagaggtagaaggcatcctcctccagagtaatcagcatagtttctgatactttttgttaggtttctgaggagctttagtatgattagattttttgtctagctcaatttgagcacaaagtgattggaattattttaaattaagttcctttttagcatcaaaataggctgtttccttatagcaaatgggactttaaaattagttaacattttattctttcttccctaagtagttgtctaagttgtaggagcagcttttaggagcacgtaatgaaatgatcttgtaattttagatgtctttgagctgttggtttgattgtgggaaggttatgtagtaggaagagaactggagattttataagtagttaggaagaacgtaacaaggaagatactggtttaaggttatgttcctgcttcttattgagaggtagttctgtagtctttattatattggtcagtggttgggaaggcagttgatgcaaaaagaataatgacctattggtaaggcagtcctcttatatctgatccatagtttcctcatgtccattttggtgaaaataaaaactaaatagccaaatgtgttttaaaaaaatgtgttttagggccctgtgtggtggctcatgcctgttcccaccactctgggaggccaaggtaggtggatcacttgagtccaggagttccaagactagtggggcaacatggtgaaaccctgtctctccgaaaaatacaaaaattagctggacgtgatggcatgcacctatagtcctagctacttgggaggttgaggtgggaggatcacctgaaccc

SEQ ID NO: 483580 - DNA, 1000 bp, Homo Sapiens
ttaagtaaatcttaaagccaaatttcgaagtttcataaagatagctcactgccttttttacttccattcctttttcctacatcagaactttctagtggcaaatactacatcctatatcatgtgacagcaaatcagatttgggtagctccaatattaaaccaacacctgttctcaccacttctactttagccttgtctgtgaacaagagttttaattgtatcctaacatttacaaatttgagtacaaaaatggaaatagccagttatgaaacaatcataaatgttctctaatgaaaaccacactctcccacctgaattatacacataggtggttttacccagagaaatttaggactaacttagttatactgcaagattgtattaaaaataaatattttaataagcttacattgattaccccgtatgtaatatttttaaaaaattgaaaatgcaaatagttttgacacttacctgtaggaggaccttcctcccatccttctgctctcttaattcgatgtgcagtgaatcctaagcagatattgactccaacggcaaaagtgaacagggatattatctaagagaatgaaagagaccaagttgtcaaatgacagctggagaagactaaatcaaattacacaaaggtgattcaaatggcttcaatatcaacacccaatcctaccacttccaaaatgcataataaggtgctatcttaatttgcacaacaaaaaggaaaatgccaatcagtcactgattctgaagatcaagcatgtcccccgtcattcctccgttctcccacctgacacgactggaacgagctcctccttgccatgtcgaggattcttggaagccttttgcagcgtgttctctttgccttcacggaggcactgctttgaggctctgggtttagtctattaactataagcaatcccacctgggaggttgacagactcctctgatttgtccagagcttgattacatcacagggtgttcacaaatcgcag

SEQ ID NO: 483581 - DNA, 1000 bp, Homo Sapiens; identical to SEQ ID NO: 309814

SEQ ID NO: 483582 - DNA, 1000 bp, Homo Sapiens
atttactataatgatcaccaaccaaatcagcagacatctttattagcaaattcagtaacaggataatctttccaaaatttacaaatatacaatatatttatagtattaccttcagacaacttcagtgcaaagatatacatatagtacattgtgataattatttgtaaaaatatgagacggcataagtaaaaaaagacacacaggatacctccaactataggcaaacagggaaaaatatatttttttcataaagtactgaatgttaacttttttcatctgtttgtaaaaaatatatgtgcaaaagtgtgtttctaattattccctaaatagctggtatagctatacttcagagtcttctttaacaagatttgcggtgtctttaaaagtgtcttctgttgcagaataggttggagttgggtctcttctcgaaggaggcttaggcttagcagggagcgaaggtgatggaggtggtgtcgcagcaacactttccttttgctcgttctccatctaagaatacaatgtaacaggaatcagccatttattcccccaaggtcaccatacacggtttttcataaagaagactatttgtggccactctgctcagaataatctaagtgtgtgtccaatttaaccaagcaaataatttctaagaaaaaatgtctgtgctaagaaaaattgttaaaaattacctgtgcatagattggattttcaaagttggtagtttgtttagattttcgtttgaagagattccattttgtcacctaaatgaaaaggggaaaacaaaaacctctcagtaatggaattattttgtgggtttcttttcctcctgtctcagttttaaaatttcttcttactgaagggtaaagcaatttgggacctgggaccatgtgattcagcccatatggtaaattgttcaattcctcctatggtccctgaacagtaactgaaactctgggctcttttaatcgaatggttttaaacacttctttgacttcaaatt

SEQ ID NO: 483583 - DNA, 1000 bp, Homo Sapiens
tttttttttttttttttttttttttttttttttttgaaaacacgggtcacagcaccttttattcgtcatcatacaacctgatgtgacaggaaatacagccaacatctccaaacagtcttaatgcctttcacaatccaatgggaaagcccaagacgccgcctctagtggggaagccatgagccttccgcctttggatgccacaaatgggaacgatagaggtacaggaggtctgccttccacgccggaccctccagcgcagtcccatgccggacacagcgaggcggcacttggcacagaacgttttcctgagaacacgtcacacgctagagcattccagaggcccgagccccttctcaacccacagaccaggattcacggggagcagctgtacctgtggcctccccgcaagactcacaccagtggatggcactcgagtccacagctgcacggagccacgggtccaaaacgaattctccactgagatgggtccacagagcctggtggccacaatggctggatctaatgtcttcctttatgaatacatctgtgcacctgggatcagttaaaaaacgaaatacttcctgtcatgatgatcaatatgcagaactgcgtataggtgaggactcttctgcctgggtggtacatggttgttgtattttgctatctagtttctttgatgcaaatttgtagcaattgctttaagacaacccattttgcctcagacagtgaccctattaagaccacgtatgtttacagaaaacttgggagtttgatttttctttagagttctcacttataacaagaagtaagaggtgtctgtgtattgagataaacagtggtatataccacacaatctaaattaggttctttaacaacatttgatgcggtcttactctaggcactaaaacaacttctttaaaaaaataaaattgtgatttccaaggcctttattttatagggaagaggaataaaagatcaatgctagtgggtgtttcgtcat

SEQ ID NO: 483584 - DNA, 1000 bp, Homo Sapiens
agaattttacttcctctggcccttgttgcttccatagctcccgatggtttggaaaatacaatctttatttttatttagattttccatagcgtggctgtagtgttaccagaaaggggtcccaatccagacctcaagagaaggttcttggacctcatgcaagaatttggggcaagtccataggctaaagtgaaagcaagtttattaagaaagtaaaggaatatagaatggctactccataggcaaagcagccctgagggcttgggtttggctattttcatggttatttcttgattatatgctaaacaaggggtggattattcatgagttttccaggaaaggggtggacaattggaaaggagggctcctccccttttagacatatagggtaacttcctgatgtgtccatgtcatttgtaaactgtcacggtgctggtgggagtgtcttttatcatgttaattttataattagtgaataatcagcagtgaggacaaccagagatcacttttgtcgccatcttggttttggtgggttttgactggcttttcttatcacaatctgttttatcagcaaggtctttgtgacgtgtatcttgtgctgacctcctgtctcatcctgtgacttagaatgcctaagctcatgggaatgcagcccagtaggtctcagccttattttactcaacccctattcaaaatggagtcactctgattcaaacgcctctgaaagtagcattggcctgttgccaaccacttcatctcaccctaagagagggagagctgttttgttttgttttgtttttttaaggtagaaggaattaaattatgtctttgtgctgatggaattgatgatggagagactggactacaggcaaggtataaactgaagtggtgagagcccaaggggatgacttggcttgaaggaaggaggggctcttcttccagtgtaactgaaaggaacaaggagaatcggctcagattcaagtaagggktttaggttyggrsg

SEQ ID NO: 483585 - DNA, 1000 bp, Homo Sapiens
ggctgatttatattttttcctacatgtttgcttctctcttcctctctttccttctgtctctcgtgtgtgtgtatgtgtatgtatcatatatacacatatgtatacgtttacatacatgagtgtgtatcctatatacatctatgtgtgtgtgctacatatattacatccatccatatatatatgtgtgtgtatatatctagccacagtggtacttctctctcttttgttattacattttacctcatagtgtataatgaaaatagcaaatggagctccacggagggaagatggcaactttcagaagcccacaagaaaactgaacacatagtgttaattttaaaataagaacaatgtttatgtagagccaactttgctacaacataaataaaccatgttgtagaagcctctgatttaattttgcacaaaccaggctcatatgaacaaaacgcctatggtggtaaatatgtagaagcatatttttccattttattaaaagcgatattccagtttcctgccacatgaaaagtgaataagttatttgatatgatgggcctgtcacttcctgagtgagtctctgtctaattcaggtttggaggttaccgtgccattgcactaaaaatctttaaattattaaaatgcgccagaagtgactgctttatcatctttgtaggaaggggtgcagagtattactttcgtattttttaaaacacttacattgtatagtaatactggtcaaccaaaaaggtgtatagaagaaaccatcgaaacccacaggcttctatggagtgatctgatctgtgagaagagtaaagagaacagaaagaaggtccaacatgattgtactactttctgctctgtttctgtgctatggacagaaagctcatgaaatacgaccgtgcagtacgtggaagagataagtgagaggtgactgcggcaggtcagagtaaaattacaaaatacactttttatggtttgatgtttaaaagagaactgtatggta

SEQ ID NO: 483586 - DNA, 1000 bp, Homo Sapiens
tttttttttttacttcacttgtttctttttatttggtgttggatccaggacaagggcagtggggaatcgaagcaggggcttccctagcttcatatcccccaggcccctgcgcctctggaatgtaccaacaaggggcaggggtttcagggggctcagcctcttcatggggcaggcctcagccctgggtttgtcacagtctggccttgaatttgcctttggccttgaccttccgacaggtgctaggaattgttccgacttcaaagggcagaggcaacaaggcacttccagctgggggcctcggaggcacaggaaagcaggagcctttcttggcttcaggatgctgggtgccaccttgaaatcaaggttcggtgggagggaaatgaagaccttagccgtgggtagagtcctcaaggccttgcctgtggtcgacagggccttagtgcccaccagcttgctgtgctgtcgtctgaggacctggccctggtgtcggagtacatggggagaaggcagctgggccttggtgtggaggctggggaagtggtgacgggctgcttatagatgagctcaaaggctcctgtgtcacagttgcggtccagcatccggtcaatgaccacgcgcagggtgtcagcttgcacgccagcacagagccgggcagtgactgctgtggagggtgccatcgtggggctggcgttgatctcaatcagccagggctggaagtcctccccgaacacgaagtcagcgccatagagctcaaagctggccttccgacactgcacggtgtcctgggaggtctgaagtgcgtggatcacagcatccttcatgccaggcacgatgatggtggaccaagcatttggggcacccatctcctgcaggtgggcctggaacctctggctagaccacatgttgtctggcggaagcagtggatgccgatggcatgagttctccaggtgcttctggatggagttgttgcacaggtgcactgagttgtccaggttcttca

SEQ ID NO: 483587 - DNA, 1000 bp, Homo Sapiens
tgtcattcactgttgtctctgctgcttctggcttggcactggtcttatacacacgggctgacctgaaaccttatcctagagaagttggttgacagcctgatcacttgacaagaggctggctggtgagggcagtgaggtgagaggggaggtgagtgagttccagatctggttcagtcctcttgacttggggtgctttaatatagctcctttaagctgtggacgcttccttggtgacaagggtgtatgggggggtggacctgctgccacttttgagtccaaaggtcaaggcctcccacgataggctgggcacagctctcccaggtctcttaataataatgtcatttctttgtgcctactatgtgctaaatattttacatacattactactattttccacaatcctatgagataggtactattaggattctattttttttacttttttttttgtaatttaaaattttttagtagagacgaggtcttgctgtgttccccaggctggtcttgaactcctgggcttaagtgatcctcctgcctcagtctggcaaagtgctgggattataggtgtgagccactgcacccgacctaattttttttttaaattacagatttattgatatagaattcacataccgtacaattcatctgtttcaagtgcacaattcaaatggtttttagtatattctgagtggcacaaccatcaacacaatctattttagaacattttcatcaccctctcaccctggaaaaactccatacacattggtagtcacctcccttcccccgctccccagcctcaggcaaccactaatcaatctactttctgtctctataaatttgcctgttctgaacacttcctagaaatggaatcatccaatatgtgcttgtttgtgactggcttctttcacttagtatagtaatgctttcaaaattcatccatgttggagcctgtatcagtatttcgtttctttttagtgctggggatcctaaaatcttacca

SEQ ID NO: 483588 - DNA, 1000 bp, Homo Sapiens
gatgccagatgggcccttcctgctgctcctggggtcatctaagctccaggcttgggtgcagccctgggcccctgccacagacgccctgaatgcacctgcccctcccggtccccacgcagcagcctcctgagctgcggatcattttcctaagaaggcattctacttgtgccagtccttacttaaagacccctgctggtgctggcagcgtgctaccgggaaggatggtgtctcctgtgcgtgtcctgtgtacgctggcctcacacgtgtgtgcctcatgcgggctgtgccctcagtcctatacgctctccccaaccctcttttagggtgtcacaggagaaaaatgacacattcctaaatctctaacacatgggcttgaaaacaagtctgaggatgccctgcagaagggccatgggcatggacatggagctgggtggcctcgtgcactgacctttccctcttcctagccccaggcccgacctagaggccacagcccctgcggacaggctgtggggccagaagggcccacttcagaacttttctcgtgggcagtgtttaggccacagccacccatgtgtaggggtggctacacatgggtggctgtggcctaaacactgcccaaacacgttatattttttataacatggaactagatggcagaagtttaaagggaataaaagagctactggagacgatttgcagctttcataaatttccagagactgataaaaacacagacttgaaattgtcccaaatgagccaaagtgatgaaaacaagtcttttctaaaactctgaattctaagggaatgtaaaatgcagaagttcaaatcgggtttagaaaaccataagaaataatagtgcattcgccgggcatggtggctcacgcctgtgatcccagcactttgggaggccaaggcaggtggatcacttgaggtcaggggtttggcagcagcctggccaacatgagacctcgtctatactaaaaataaaatttagccatgc

SEQ ID NO: 483589 - DNA, 1000 bp, Homo Sapiens; identical to SEQ ID NO: 120133

SEQ ID NO: 483590 - DNA, 1000 bp, Homo Sapiens; identical to SEQ ID NO: 309818

SEQ ID NO: 483591 - DNA, 1000 bp, Homo Sapiens
tctggagaccgtctctcatctggaccagtcctcactgtactctctgaaactcctctaccagtagctagggtgatttcaaaaacacatatctgggccgcgtgcagtggctcacgcctgtaatcccagcactttgggaggccgaggtggtggatcacctgaggtcaggagtttgagaccagtctgggcaacacggcgaaaccccgtttccactaaaaatacaaaaattagccaggcatggtggcgcatgcctgttgtaatcccagttacttgggaggctgaggcaagacaatcgcttgaacccaggagctggaggttgcagtgagctgagatggcaccactgcactccagcctgggtgacagagtaagacttcttctcaaaaacaaacaaacaaacaaaaattatctgacatctcaccctcctgatcaaacttgtcattggcttcccattattctctgtttgataaaagctaagtctttgccacagccacagcctcacctctcaggcctggctgttcgtccatcctcacccactttcttggagatctgagacaaagctgccctccctccagtctcagcatctcttcctggaatgctgctaactcctgccatacaacctgttcattctgcttctgatctcagcttaaacgctgcttctttccagaagccctccctgatctacaaagattcccatgttttgtgttcctcatgtagcacttaagtttgtcactgtctatatgtgactatttgattgtcttcccaactgtggactccacagggtgtgttttgcttattgatgaacctcagtcctagcaaacctagcaggtattcaaatatttgttgttgaatgaatggtgtagttttagaaaaattaagtctggcagtatgcagagaagatggagtggaggcggcgaggaggctgttgcactggtagatggaactacagtggggctgaggaacagacacaaggtagacttcgaagtcagatcttcctggatttcag

SEQ ID NO: 483592 - DNA, 1000 bp, Homo Sapiens; identical to SEQ ID NO: 309819

SEQ ID NO: 483593 - DNA, 803 bp, Homo Sapiens
  misc_feature (377)..(377): n is a, c, g, or t
actccccctgccttagttgggcccagcatatttgttttaaattttttccacacaaggtgtgggtccccaagtgccacagatgtgtccttggaggtgaaattctcaagtttgaggaaggggaaatccctcgttggggcttggtaaatcaccaagcctcagggacgcttgatgtggccgccacctggtggccacagcaggaggtacggcgttggtggcctgatgggggctggtaatgggcgtgagccttcctgggtgtctgcagcaggggcaggcaggcgtattctttccactgtgtcatcacagggcctgtgctctggctggtggcaagctctgccactaactcgggagatagaggaaccggggttgtgaggagtgcntaggactagaccaagtgtgtgtgtttgtgcggtgtgtgtgtgagtgaggccttgtctcttcatggatcgattgtctcctctacttcaaagttcctttggggactttccagccactcactaatgaaatgttaataatcccacatattttacagagtaagaacctgaggctcaggttggtgaactgacttgcccaaggtcagaacgaataacagagaaatctatctgagggcctgttggacccttaagccaaggtctaaccttggccttccaaattccttcaattggggagattaaggaagggggtgaatgtatactcacagtctccaggccaccatttggtggcagtcagcgtggggctgtgtatcacaaactcctgggtggctgcgtcataggtggcttcagtctccaggccctgaagatatgtcc

SEQ ID NO: 483594 - DNA, 1000 bp, Homo Sapiens; identical to SEQ ID NO: 309821

SEQ ID NO: 483595 - DNA, 1000 bp, Homo Sapiens
ctccacattcacctttatcgtaccaccatttgtttttcagcttgtctaagacgccttgctcactgagtttcaatactgcaagatttactggggttcttcacgtggaaaataacataaataacattatcaatgttattttatgttattcattacataatactgattcaagagctttgtaagagcgatagtcattgatgcgccatttggcctaagcaaacggtaagatttgcagagccaaatgagcattaatgtatcgctggaagtaaccagcaggtgcaacagtttgcaacaaatccattagttacaaatttttccttgagatatggagaaagagagggaaagagaagtacaggaagaaagaaagaagaagtcaagtgtcctggtcatccaattgcactcttcagcttagcgttggaaacttggtggcacggagtgcccacactgtgcatagctgctgcttactttgttttgcattgagttacccattacttttctcactggggctgaccttggaatcacctcccccgctgccgcactctcctttgtcgtaccaccatttgtttttcaatttgtccaacaggccttgttcattcagttttagtactgcgaggttaaccgcatttcttgaaacgataaaacatacttgtcagacagggtgagcaaattttagactttttgtttgttttgttttaatttcgttyttctttggcttctgtggcaactcttgtcacaaaaaaaatgaagtgggaaaaaggccacaataatatgttactatgagctactaaaaatctgaaactttgggtaaggtggtagagcataacaaaaagaaaataaaggaaagagtgctaatatggggagttctatattctacagcaatgtactcacatccacaacaaacaaataacagtgtcttgaatgtgactccactaaaaaaaaaacaaacgacaaaataggaatacaaagagttaactacatagtaaagagatgtgtgcaaagaaat

SEQ ID NO: 483596 - DNA, 1000 bp, Homo Sapiens; identical to SEQ ID NO: 309822

SEQ ID NO: 483597 - DNA, 1000 bp, Homo Sapiens; identical to SEQ ID NO: 309824

SEQ ID NO: 483598 - DNA, 1000 bp, Homo Sapiens; identical to SEQ ID NO: 309825

SEQ ID NO: 483599 - DNA, 1000 bp, Homo Sapiens; identical to SEQ ID NO: 309826

SEQ ID NO: 483600 - DNA, 1000 bp, Homo Sapiens
caatgaaaaatcaaactaccttccctggttctttaatgcctctctccagttgtgctgattgtgtcgttacacaccaggtgccatgcactctcttccttcaactgctggtatcagtcaggaaccccagatgccagagagctggcatagattgagctctgcttaaaaactggcaaataataggttctctttgcccctttcttttccgacttataggacatcaaaggaaatagtatataaacacgaactagtttctgtaacagcccattaaggttgactagaagcaaaaggaagagaatgttgggggccatctgtaggtgcattagcttttctcaagaaaaaaaatacccacgttctaagggctcttaaaaacgtagaaaacttgccctgttaccacgggtctttagaacacctctaaacacacacaaaataagacagatagtacctacaaatttcaaccattgcttaaactctaaaagcattttttgtattattttgttttgatacagaagggaaaactcagctataaagaaatattaaaaaggttttttttttttttgtgatcagtctcaagaatattccattatattccattgcctgcctcccccaacttgtgctgatattttaaggatgtgctcaagagtatgaagcagggtgcttttgtccctttctctcctccctagtaattccctcctccctatcccatagccaagtagccacccctcaaatgagccattcctttttgctttcatcaatggtctctgtgaagttggggtcgttgttcatgatggcggcgtccgcgctctctgccgactccgccccctttgcttcgttggtatggtaggtgcccttgtggcggaacatgtaccggatcaggaagaccagggtgcacaggatggtgaaaatcaccacagcaatgacgcctccaatgatagccgagtttctgttgactccatttcttatagcttggccttgtcctggattatatggaaaatctgcactg

SEQ ID NO: 483601 - DNA, 1000 bp, Homo Sapiens
tttctccctcctgtctcccaccatccctcttccatttcctcctttcctcactcctcttttgtcctctttaatattcctttcttgtctttttttctttccttgctacctttcttttgtcttttctctctccttcccctttttcctgctttccttcctctcttccttctttttttccctttcctcctccttccttccctttctttcctcccttctttgttctctccttcctttccttaagggtcagatttagtaatcactctcaaagcaaaacccaggacatatttttcccttcatttgatagattatgtcaaaaaagaaaactgctaattcttgtcaaatattgttgtttcagagcaattttacttatgtttatgtgatgaaacagaaaaagcattttttaatcagatttctccgacactaagctataaagtacaaatcatccactgctattgattcacaattctagaaattaaactttgaacttcatgtgtgctttacttctaaaggcttaatttgcatatttcacatctctattcttctaaaagataatggtatattttctactgtctaaaatgaagcagatttgcttaatttttttaaatggctgtattcttaaaacttaaaaaaattaaagttgtaattgtagcttccatttttttcactgaatataattcacttagtaaaaattatttttatttcaaaatggaagcagctcaccattttctaaaataatactttaatcaagcaatacatactaaaggggaccataagcttttcaccaaatatgttttctgagttcaaagtctaaagctagtgaaaggttagcttacttgaatgtcatgtccttataccccttctgtggcaaatatttcaattactgcacgtctaaggtttggtctgaatctcataactaactttgccttgagtcataaaatgtctcattgcattatcttatctatcttctggtgctttggaattataatcctcacattccagtctt

SEQ ID NO: 483602 - DNA, 1000 bp, Homo Sapiens
acaatgagcccagattgcaccactgcactccagcctaaatgacaaactgagattttgtctccaaaacaaaacaaagaacaagaacgggtgggaaatacttaaaatgatcaaattctatttggttgctttgatgttctacagctgaaactcaatcacagacaaagtagtatttcattatttttccatcagtaactcaataactagatatttctggtggataaattgctacaacaggttaaaagttttcattcaggtgctctttatttctgatattccttggtaaccatccttgcagggataacattctcatcactgtagaactttagcttctctttccgactctgtaggacacgggtccctgaagttctcattgatgtcacctcaacattttcctccagccttgccccctgctgttatgtttttttccctcacactgagcacttccctgtgcttcctttaagttgcatgtggcctggacacagtcactcatgccagtaatcccagcactttaggaagctgaggcaggaggatcccataagcccagctgaggcaggaggatcccagagcaacacagagaaaccctgtctcaaattgtctttaataaaaattttggaattattaaaaaatgaaataaataagaaaagagaaaaatagtttgcacctacatagtagattttagtgtcccagtgcctggaagagaactttggatttctctaccccgctaggcacgccttccctagcagcaaagatggagctccagttcctcagacggtgatgagccacaggaagggcagggggtgggaccaatgaagatcctcttgggctgcctgacttccctcagtgtacacatcagctcagcccgaagtagggcgaagatctcccaatcgacacgaaccaaggaattcaaactctcctcaggggcaggatacgtctccaggcttaacttgctcagcccactggtgtggcgcaacaggtccttcagggcacccatagacataca

SEQ ID NO: 483603 - DNA, 1000 bp, Homo Sapiens; identical to SEQ ID NO: 309827

SEQ ID NO: 483604 - DNA, 1000 bp, Homo Sapiens; identical to SEQ ID NO: 309828

SEQ ID NO: 483605 - DNA, 1000 bp, Homo Sapiens; identical to SEQ ID NO: 309830

SEQ ID NO: 483606 - DNA, 1000 bp, Homo Sapiens
ttctgtacaggctcaccgagacatcattcgcacaaactctgccaggacgaagccaaggttttgggtctgttctctggactgcgctaggagtgaggatcatctgcaggccttggggcgggtgggagtgtggttgaggggagggtcttcaagggcatcctctggatctgatagggaataggcctcagagccgggaagaggaggctttgtcttatgggggaaaaacaaacaaacccttgtaatggaacttgttttcctttttgctttgacagctaggaagctcaggagcaactttgaggcctacttatggcaatacatttccacatagtaattttccttggcttctattattatttaatcattttacccctttatgggaatgcagcatagaggaagagctgggttctggatcaggctgcccagattcaaatcttgactccatctacttgcttttttgctaagtgcctaggctttcctgagaatggactttcttctcttgcctatggggataacaattccttcctctcggattctccatgataattaactaggagaggacatgggagtgcgtggcacagggtctggtgcccagtggtgactcttgctgtgcggtttcttatctgctaggacccttccagggcgtgtgttgctatgtgcggcagggggtaccttcgaagtcgaccagaccgtccccattgaggtccacgtcctggaggatctcgtccacctcccgctggctgaggcgctcccccagcagggccttgagggccgcccggagctcgcccacgctgatgcggccgtccccattggtgtcgaactgtggcggcgttggttgtggcgtctggtcactgacagtcattcacacgcgcagcccctcactcacggcagacacgcagccctgcccgccctcagccccagtggccgcacctcccggaaggcgtcccgtagctcccggacaccgatcatgtctgccgtctctgccagcagcttggggcccatcagc

SEQ ID NO: 483607 - DNA, 1000 bp, Homo Sapiens; identical to SEQ ID NO: 120134

SEQ ID NO: 483608 - DNA, 1000 bp, Homo Sapiens
tgggattacaggcgtgagccaccgtgcccggctgcagagacttatttttaacaatatggcattcagtagtttgactattttacattgattatgtactactttttcctgttttaaatttttttttttttggagatggagtttcactcttgttgcccgggctggagtgcaagtggcacgatcttggctcactgcaacctccgcctcccaggttcaagcgattctcctgcctcagcctcctgagtagctgggattacagatgcctgccaccacacctggctaatttttgtacttttggtagagacggcatttcgccatgttggccaggctggtcttgaactcttgacctcaggtgatctgcccgccttggcctaccaaagtgctggggttatagacgtgagccactgcgcctggccgtttttgatttttaaattaaaattttataatagaaatagggtttcgccatgtagcccaggctggtctccggctcctgagttcaagcaattcgcttgccttggccccccaaagtgcttggattataggtgtgagccattgtaccctgctgagcatgtactattttcacaataaaaatgacccctacaaagaaggctctatgttccagaagtctgagtgaacatggctccgtaccggaaatcgctaaggaagcgctgcaggtcgtgggagtcacccaactttgccttgcgctgatctgcacgtttccccaggctgctccaggcctggtttaactctgtgcacttttcctgcaggtcttctgctgactcgggatgggactggatcaggcgctctgctgtttcaccaagggagtttacctatgggaagaaagtggtgaatgagcttgcagtaagggggtatgctctgcagaacagaagactctgctctttctggggcaaaaatgccagacagaagatgactttgggtcctctcaccttgtcaccgagagccgcaaggtccctctcgaagccctcatgcttgcgttgcaggg

SEQ ID NO: 483609 - DNA, 1000 bp, Homo Sapiens; identical to SEQ ID NO: 309832

SEQ ID NO: 483610 - DNA, 1000 bp, Homo Sapiens; identical to SEQ ID NO: 309833

SEQ ID NO: 483611 - DNA, 1000 bp, Homo Sapiens; identical to SEQ ID NO: 120135

SEQ ID NO: 483612 - DNA, 1000 bp, Homo Sapiens
cccggtcggacacctccggccacgggaccctggccgcacgcccccacaagccccaggcgcagtacctgcgccgccgcctcccgctcgcgccgcccgctcccgccgcgcagctgtcagtcaagcggacacgagaaacgcgaaccgccgccgcagctttacggccctgctcagacgccgtagcgccgggatgcaccaagacggtgggcgggggtgtgcggtctgctgctgccgcggccgcgcgggcccgggagccccgggacgcacaggcccaggagccccgggacgcacgggaagcccccatcgcggcggaaactgcggccagcggtgccggggccggtggagggacggccagagcagcggagaacgagcggagccgattctcccgcaacagtggacgcgcccggggcggggcctggggggggttcttcgcgtgcggcccggccgggccgggcagtctgggacgcgccgccgccatgatcatccctgtacgctgcttcacttgtggcaagatcgtcggcaacaagtgggaggcttacctggggctgctgcaggccgagtacaccgaggggtgaggcgcgggccggggctaggggctgagtccgccgtggggcgcgggccggggctgggggctgagtccgccctggggtgcgcgccggggcgggaggcgcagcgctgcctgaggccagcgccccatgagcagcttcaggcccggcttctccagccccgctctgtgatctgctttcgggagaaccttatcccctgaagtctggggaagagaacggagttgggcttcaaaccagtggtgtcctggggattctaggtggcctggcgggtcgcaggcgtcttgtcacccgcagtaaagcccttggcctccgccctattcccatctctgcccccaggcccaccccatgtcctgcaaacctcgctgcaggacgggcgggcgcggcggctgacatctgtaatcccagcagtttgggaggccgaggcgagaggcttgctt

SEQ ID NO: 483613 - DNA, 1000 bp, Homo Sapiens
ccctagggagactgaggcactatttttaaaggccagtgtgtctgactggaaacggaagcaggaaggctttgagagccaaagaatgggccccaggctagactcgcctggggcacccagaggtacaggggacaagctgcttctcagtcccccgctcccatttcttttctgttttgattgtactgagggctccccagggaggggtggtcccggtcccggtcccgggcagccctagtgtggacagaagacaggcaacccgcagccacagcagggccgagcggagaaaggaagggtggctatgccaggcctggctgccgagccccatcaagcccccaatgaggcccctgagcagggagccgtctctgcagcgccacctggtgatggtaggggagctacggccagaaggtgacccccgaccccaacccttccaaaaaaagtcccccatcaaccatggctcttggttgcagctgttttatttccagcatgttcccaacctggtgaccctccacagtccagcagtagagagatgggtaaggggttagatcggcccacacctccacctgtccctaaggttacctcagttgctgaaagctaaaaccttgcgcgcaagggcgaccttccccaggagggaggagagacgctggaagagcagccaagcctccaagccagggccggccgggatcagcagaggtgcaaagtcccactcagacggacccagcccttcccctcccaacactcatcccttccctgctgggggccggggctggggctgggctcagtggcccaggaggcgcagcatctcctgaggatccaccagcttctccctgggcttccccgtgccctggccccgggccacctcctcggcatccagcttctcccagtctgagaaagagactggccggacccctgaagcaaaggggagattgtcaacacctcctccttcacccctcccagaacagccccctcccaaagagtgaggcccagagaaggaccacccacccca

SEQ ID NO: 483614 - DNA, 1000 bp, Homo Sapiens; identical to SEQ ID NO: 309836

SEQ ID NO: 483615 - DNA, 1000 bp, Homo Sapiens; identical to SEQ ID NO: 309839

SEQ ID NO: 483616 - DNA, 1000 bp, Homo Sapiens; identical to SEQ ID NO: 309840

SEQ ID NO: 483617 - DNA, 1000 bp, Homo Sapiens; identical to SEQ ID NO: 309841

SEQ ID NO: 483618 - DNA, 1000 bp, Homo Sapiens
gagaggattctttgagaggcaaggattcctgtcatgtaggggcctggtcaagagacctgaacgggagggtgcagagggacctgacacgaagagatctgtgctcacggtcacagcagctctgagcaaccagttccagccgtgcttttatatgtgccaaggaaagttctagagcatttttgagaaaaacaaaatactgaagaacaagacaagggaatcaagaaagcagggacaaagtgacagagaaagaagaagtatgactggacataatatgggactgggaaaacaccacacagagccaggttgctgcagaatttttaaatttgagacagtgatcaaaataagcttaaagttgaggaggctcagggtgaggagaaagcccatcattcagaatacagggacacccctgcccaggtgccatgacctgaatgcactaagggacaggcaccaaggaaggctctggcagggtgcgacccagaggggttttgggatccaccatcatggagatgcccttcccttcatgtgaggtggggtttctgctctcactctgccttcagaggtcctacatgagaactactgggtggcaggggaataaaggagaattaaggagaaaagagtttaacaatgcatgcctatcttagaggagagaggctatgaaggaggcctagagtcttgcggccagctcctgctttctttaaaactttcaggaaggggaagggatagatgtcacaacttctcgggattgcttttttagggacacaggatagtctgattcatctaccctaaaatatgattttcctttggaatagatatttcaggatcagagagttggagagataggtgttcttttccttaatcttcaaacacacacacacacacacacacacacaccatacatacacctatgcatataccaacaaatacaattctacatatccatacacacacacacacacacacacacagctacacacacatgctaagcaggtgcttgggtagtaca

SEQ ID NO: 483619 - DNA, 1000 bp, Homo Sapiens
cataaacaccatcaagactccaaaatttgatccctacctcttaaaacctgggagaattgaaatatgaaacaccttagacataactctgaagtgtaatatgatcctcagggttatctcttaaagaatactaaatgaataaactaagtaggcagttaactttgtttaatgagcattaaacaaactgttaataataccacacctttaataacttacttctccgctatcttccacctacatgagtgtgaatttagagctgtggagcagtcagataaccaacaaggtttgtaatgggcacagctcattcatctttttggctcaactaaaaattcccaggccattctgtgaacacaagaaacatggaaagttattcatattaatgaaacttggtgtggggggtgggtggaggagagaaatcctacagactcaaggatatttccaggaaggggaaaaatgtggcttattgataagtcagtcctttatatagaaaccagaaaatgttcctaaagtcagtggaaaatggtagtcaagaaaaccctttcagctgagtgcagtggctcatgcctgtaatcccagtgctttgggaggccgaggcaggatgatcagttgagctcaggactttgagaccagcctggccaacatagtgagacattgtctctacaaaagtaaaaaaattagccaggcatggtggcatgcatctgtagtctcagctactcaggaggttgaggtggtaggaccgcttaagcctgggaggttgagactgcagtgagccgcctggagccactggactccagcctgggaaacagagcaagaccttgtctcggaaaaaaaaggaaaccttttcattggagtagacacaagtctgtataaaactaaatcagttaaaagtatttccacaaatttggatgttgaagttctgcagaatttctaaaaccaatctcaacctcttaaaagatagcacatttctgggtaagaccacatagggttcaaatcccagttctat

SEQ ID NO: 483620 - DNA, 1000 bp, Homo Sapiens; identical to SEQ ID NO: 309842

SEQ ID NO: 483621 - DNA, 350 bp, Homo Sapiens
gacacgcacgtacccatcttccccaaggatacatacacccgtggagctggagggtgaggggccagggaggagtgaaggggacaggacacacacatgcacttgatgaaagtgctaaagttttccacttgggtcccgaaaagcaggtagccgagttgggcataggcgaagaaaacaatgaagaacatgacggcgaagcccaggatgtccttggcacagcgggccagcgtggaggagagctgggtcatggttttgttgaagctgatgtacttgaatatctggaaggaccatgttgaaccaagggatgaagaaggaaaagggaaaagcattgaaaagtccatgccaagggccta

SEQ ID NO: 483622 - DNA, 1000 bp, Homo Sapiens; identical to SEQ ID NO: 309844

SEQ ID NO: 483623 - DNA, 1000 bp, Homo Sapiens
tcaaacttctgagctgtcattgtgatggctctgtgggggcaccatgggctcactgctgctggagcctttcggggcatccttccccctgaaactttccttgcccctgcacatcagcactgcaatgacagtgaggcagatggtgagtaaccctaccgtggtgcctcccaccacagtgaccaggctgactgcagagctggggctgttgagctcccaggggaggatgccatctggaggtgctctcccatgggggatctgcctcttggtgcggtccagggcaatgtgctggatgtttgttcctcgactgttttcagcaccaatctcccatgccagtgagggtgtgctcctgatctctctcttcttccggctcttggtggtggattggggctttccttgactcaccagagaatggtactccacacttcttttgccaatacctcgattggcattgtctttcgatctcactgtatagatcgtatgtatataccattctcggcctagagcgacctgaaagagtggtgttgagtcgactttaaatccatcagatccaggctgattcactaagagaatggcttcagggtcatccactgctagtttggcattaaataggacatttccaaaactggtcgcttgtgtctctggctgagctttgtccacaattttaaatctatataagagtgaaggagagtcggctaagcagccatattctgcattcattggactatacttgggaacatagccatcagctccagtgcatagaaacaccttctcaatgctgcagtaaaaggagtcacccagattctggacaggatccaccatgacacgaccataaattatatcaccttctgcaaaagcaacatcactctcttgcccgaatcccatggatccatcagacaaccagagactcttcttagagagcaggtacatttgggtgttcaagctaaactcagcagccactggatcactgacctgttggaatcggatgtcaaggtcaaaggtgaca

SEQ ID NO: 483624 - DNA, 1000 bp, Homo Sapiens
ctagtcccagaaggtgtccagccgagactctttcgggaggaggctcttcgtgctggtactggtgttgtgatcggaacgtgtcgatcccctcttctcatcactgctgctccaactggatttattactccgggaatggtacttctgggcggggtagttggggtgcggctggtggtctgtggtggttggggcataggcaggttgcttgtcacaccttttgctaacagagccttggttggagcctaagagaatggaggagggcgtctctctggagccagaaaggtcaagggtcgagccactctccttgcttttctcagctgacgtctccttctctttggaggcgctggccgtttctgaaggtgctgattgtgtgctcgaggagctcccctgggaggacttatttagtgtttctgtgttcacctcagcatccgcttcctgctgaggagcagtagctgactgggtgcaggacttcatgtgctcaggccagtgggcttgctggcaggggtagtcacagtagctggtgttccaacagcagtaaaagatggcctccttcttgcagttggcgcaccactgcttcttcttggtctcatccaccgcctgctgcttctccaactccagctgcttcttcacctcggcgatgagccggtcccgctcctgctccaggctctgccgcatctccgccatggtcagctctaagttgtgtttcatttcggagagctcttgctggtgcagccactggagcttctctatctcgatcctcagcctgcgaatctcagctattgtgcttccagtagtgtttttagaaagatcgttgtatatttctgtcattgttccttttattgcatccatcattttgctagtgtacttggcaatatcagcggcgacatcagctgaggcagtggcgatgggcaggtcagcgttgactgaggacacaagggtgctcatggaccccgagctggtgaccaggggcgatgactgtgtgctggtcaccagggtgatggtg

SEQ ID NO: 483625 - DNA, 1000 bp, Homo Sapiens
gctctatagaacatcatagaaagtaatttaataaattacaaatgactttttaagacgtttgctcaactacagaaagcaaattcagactacacaaaacacaactggtaaatattgcaaatgtccaaaagaaagattggactaagacttgaatcataaaacctgaaacaagggctataaatacaaggcaataacagctataattcttttagtaactaccaacacatacttggatattctttcaactgcaactttagtattatgtaattctactgatttttttttccttataacccttaactttacacaaccatatttgcatgtgttttcttagctgatagctggacaacttttccccaatgaatattaaatagaagtgtcttgaaacctaagagaatgtttaaagttatgttagacttaatgctttgaaaactgtaattgccttattatatagaaagagaatcactaggatgttaaccaaatttatttgaccataattaggaaaatactttctctcataaatttgatataaattagattttagtgacaagatctacagattttttttccttttttttttttttaattggcgaaaggaaggaataaagatcatgtgggtagaattagagggaggaagggaaatgtggttggtgttgaaatactccaccggtaaactaagataactgtgtttgaaactttggctatctcataggtgtattctagttaaacaaaagtgcaatactgcaaagggaagatactaaatatgtaatatatcattttcatgatgaagaattactacccacttctcctggatgggcattatagagactattgctaagacattgcataaaggactatcaattcaaagtactattttgggaaaatacaaaatcaatacaatcccaatggaacttatataattttgtaaatacatataacactgtctctctaataaggggttattttacatacagaaacataatttactggtaaaggtcttgga

SEQ ID NO: 483626 - DNA, 1000 bp, Homo Sapiens
actcactaagcccccacccccaccccttcctggaagctgttgtggtcatagaaccaaagaagtttcctctctgttatccatttcaagcagatgtttagtggacagccaaaaaaaggcccaagtgttgtctttgacaggaatggccacaggcagatttactcagttttcccttctgtagaatggaaataagagcccgtgcctcacagggttgtgcctctctttataggattaagtaaatttaagtatgcaaagcacagaattagggctggcacgcacaaagtgctcaaacgcgagctgctgtcttaccggacacacgccaaaactagaccaaccgtttctctccctggagagttgtgggtggaaccgtgagggatgcccagccacagggcaggccccgtacaccacctgcagcccagcaggtcagccttaggaccctctcccctggacctgttcagaaccaagttaaacttttggccaaagcacactcgctagaaaacttattttttttttaaaaaaaaaactttcataataaagtttattacctaaactgactttaaaaaatataaaataggattctgcacagcagaaaaataaagccagagaccctcccccaacccctggtttgtgcaaagatactgggtatatgtaaacatgaagaggtaggaggtgcgagttcaggtcctggctccagatacagttaagctgctacaacaaccagggggacccagagggagcaccaggagggggaggaccccctcaagaggtgagaaggggtctgcggcctcgtctccagccgagggcgggaggcgcctcgcccctacacccatccgctccctccaacccaggccggggagggtacccacatggttccaggcaagtaataacaaaataacacggcatcccagttaatgctgcgtgcacggcgggcgctgccggtcaaatctggaaggggaaggagctcaggtagtcgcggaggacggggttgagggggatgcgagcc

SEQ ID NO: 483627 - DNA, 326 bp, Homo Sapiens
caaaaaagaaaagagaaacaaaacaaaacagccaaagatcaaaacaaccaacacccctggccctatgccctacattggggggactgcacccagaagctttctaaggagcagggacttgtgtttgtatcttcaaacatactttgcttaggatctggcatgtacaatcgcaaaggcagtttctccaaacatctctgtccgaagaatccatttggacatctggagaaggaaaaggggaaaaatcacagaacaaactggcatcatccgcgaggctaaggttagaaatcaaagtgcacagtgatgaatgagaaaaaccaagtcaggcactt

SEQ ID NO: 483628 - DNA, 1000 bp, Homo Sapiens
agatgagggaatgaagggtacctgaagctcatgaccagtgtttgtcttctctataaatgctttcaaataaattacgtgttttattactctatatcctccacgtaagagtacaaggaatcaattctgcttggaatgtggtgccaggaaaaaatgtcaagtgataatcatgcatcctgttatgttttactgtctgctcagagagccaaattaagtgctcagctgttataaatcttactctggtttctggtctgattctctcctgtttcctctataaagaaactatttctttttactttattttaatttcctggtatagatgcatctttgatttggggaagcaggtaggccccactagaataaaaggtgacaacagtcccaggcatgcctggtgtttggtctttgccttgaccccgacagcctacaggttaggtgtgtgtgtgcctggcagccccaggatgcctgcctggctctatgactcagaaggcaagaaggtccaggccacggctttcaggaagccctgatagtcagcatgccaggcagtgcttctaggcccaccagttcctctgtctgaaggtcactgttgcacaaggaatagctgcatcatcacccacccacctctgcaacgactcactgcccttcccaccagtgccaccctggcttaggaaatgccacaaggctcttctggtacctcagggaacaccgtgcctaaatgtttctcagggcttacctgctccaagggagcccagacttgacttattccaggacctcactcctgttacatattctggagtctaggagtactggggccatgggcttcagagaattagtggaagactctaatgtgaccctaggtggccagagaaactgctaaagttagataacatgtgtctcctgctgctgctacaggccagagtgacatgcattactgaagagaagcctgaagaagctgacacggttgggagcacattcactgatcatttcatcagcctggctcagggag

SEQ ID NO: 483629 - DNA, 1000 bp, Homo Sapiens
tttttttttttttttttttttttttttttttgattgaggaccaaactttaatatttcaagggcaccccaaatgagttactggtggggttacataacctttcattcatgccaccaaaccaagattcatgaattctgaaagttaaagttgattacctctttggatacataaaaaatatatatattaaagcatgtcacaaagtgcaaaaaaaaaaaaaaaaagaggcatccagcagatgaaaaataggctcttggaaaagcccaaagcagcaggctgattgtcctaacaagaggacagagaaactctgtaggaaataaagctgcctcagccaaagagagatccagacatgggttttgatggattcttattacaaccaaagacaagctcaaagaaagtggaagttcagatttcccatgggtgcagttggatcttgcatccaagagaatgcttggttgacttctcatatgcaggctgagcaagaagcaagcagcaagacttagccagtgattctgattccaggatgacatctctgtgcttgagctctgagctccttcgggcaggacagcctggaattgctcctgcaccagcatttccacagtctgctcctttgtgtggatatcaggtctcagccaccaccgtccagcaaggtcctagagatgcctgaggacatccctggggccagctgcatcctcatagcagaacttcctgaacctctgccgggaggctttctagcatggtcttaaagtcttcaacagagtcttcactgagggtctctggtgggagcccagaaggctctcgtggaatctggacctggaaagcaggtagtaggacaatttctggctcctcggcctatcatttcattgggtagtgatctcatttgatcattctggacttctgtatttctttgtgtctctgggtacacttcagtcacaattctggaactctaagaaaaaacgttccagacttctacgcagctgccacctcggaggacgggggagcggg

SEQ ID NO: 483630 - DNA, 1000 bp, Homo Sapiens
ttttttttttttttttttagacggagtctcactctgttgcccaggctggagcacagtggcaccatctcggctcactgcaagctccacctcctgggttcgcgccattctcctgcctcagcctcccgagtagctggggctacaggtgcccgccaccacgcccagctaatttttttgtatttttagtagagacggggtttcaccgtgttagccaggatggtctcgatctcctgaccttgtgatctgcctgccttggcctcccaaagtgttgggattacaggcgtgagccaccgcgcctggccacccacctctcttaagctataccacatgctcgtctcaggagcttatctcttcccaccacccaacgacatctattatcctactgaatgagcctatcttctcttcagcactgccagtctcttcctctcaattggctctgtaaggtctgctaaggcttttcgagtgacatcgaagggatcaaaacccaagtcatcctctggttgtttagaagaaccaaagccaaaagctgcttgccagtctgtagaggatgatactgggattgtttctgatgtgaagaggctctgtggttctggtgctgtaggccagtcactggatgtctgtggggagctggggaaaggaggaagcccacttgggatagggttgggatggcgaaaattgtctgagaataacgactgtgactctgttactgccccttcaaaaggggaccgtgcactgtgattggatgaactgatggggatgactggattggattttgacaaaccaggtggtggtgaaggcgtatcactgttagatatctgctgggaattatcaccgttccctatactgagagaatctgaaggtttgtcaatgggggtatcgtacctctgcagtggtgtcactttgttcttatttttatcaactgaacccgtagatagctgaagaaaattgggatttaatttatataattcttgaagtagcttctgttcatattcttggtgtttac

SEQ ID NO: 483631 - DNA, 1000 bp, Homo Sapiens; identical to SEQ ID NO: 309848

SEQ ID NO: 483632 - DNA, 1000 bp, Homo Sapiens
gaggggagacctttaattgacagtgtcatctgttagaaatctcacaaccatgccagcatcagatgggctgcttcagggaccctggctgagctgcttttatgtggttaagaagaggctgctgctgcctggcttcccagagttcctggagacaggtttgatggctggccagggccataggagaggagcacactgggaatccaggaccagcctctggctgccagccccctgctgtgccctcccaggcagctctcctgctcctctgtgccagccgggctgccctgctcaccttcctttgcacacactgacttctttttccctttaccatcccactaccctgactcttgaccttgaaattatggtcattgcaccattcacgatggctgacactggtgcagcactttacagtgtaacagagctcctcacacaagaagctcatttaatccacttagtctgcatggaggggaatggtgatgatccacattacacaaatggggaaaccaaggttcagataattgaggatgtcattcctttagcaaacatttagtgagtcctttctttgtgtgaatcccagagaatgaaaatgcccccaaaaagcacaggccccagccttgaggactcccttggctggtcttctgactccacattcagagctatgcccgccttattcattcgtccatctatccgtccaaccagccagccagccatctacttgttcattcatttatccattcgtttaacagacttctcttgagggctgactctctcccaggtactgtgctaggctcttgggtcccgaattatgaagaccaaacctagctcacaattttggagatggggaggtaggggaagacatttgaatttcatggatccttgacattgccaaagtatgtgacccaagagtttcccaaatcccaaatcccaaatatatccatagtatagaatttcctccataaaaacacaagtatttcactagctggagtacttgaatgaacagttggcc

SEQ ID NO: 483633 - DNA, 1000 bp, Homo Sapiens
tgtaaacgtactgtctaacgaatgtcagcaatatttgggggtattcatggagtccagaaaaggagaaatttaagatttaaatttaatttgcatgtatatttccaagatagaactgcaagaacagtttgatgtaaccagacaacaggaagacttcaaattccaagctcacaaagtcacagaacaggacagggaggtgaagcagtacactgatggataggcctgtgtgaatcacgaactatatctgtcccgtttgcctgatccatgaccgcatgcaaaattttgaaaggagctacatttgttaggggaaagtccacagctatcctttgattttcgaaaaggttcagagagccacagttggaaacaaacattctgatctatttccctattacatttctcactataaatgtaaactctggttactatatcagcatcttatagtttacataattaaagattaactagatgaactgatcaaatcaagttaccttacctgaaacagtgctgaccatccctatcctacttggaaattctagtcttccaagttccataaaatcacctaatttaagttctctccttttcttcatagcagttcttctggatccatccttccagtaatatgtgcctgtattttgtaacagtttcagtaaatctacatcagtggttcttaactctttatgtttaaagtcgggagaataaaaaaggaaagactgaaaatgagaaaaaggtcagggtaattaagagatgttttagaacttgcaagaaacagccagcatagcatggggactcctgaaggtcccttatgccctttcaggtcattcatgacatcaaaactactttcacaatagtagctgctttttaaaactctctttcccttaaaagtatacagtggcattttacagaggctaattaaaatgtgatatcatcacagacttaatatatgtcaccacagatatgcattatatccagttatattaagccagataataaagagatatcaaaa

SEQ ID NO: 483634 - DNA, 1000 bp, Homo Sapiens; identical to SEQ ID NO: 309850

SEQ ID NO: 483635 - DNA, 1000 bp, Homo Sapiens
  misc_feature (22)..(22): n is a, c, g, or t
  misc_feature (30)..(30): n is a, c, g, or t
tatccagtgatgccactgagcncaggatgntaaagtggacccgctcggaggatcccactgagacccccggggcgggagccctgtggtggacccactgatgcaggtctgacgccgtgtccccactccggccctcccagtggcttcccaagtgctcctgcccagagccctgcccgtcccaagctgagcctgagatccgagggcggctcttccggaggcccctccaggacatcacgcagccccacagcctgttggacatcgtgcctcttgtggtttggcccttgctaggtccaacatctccccagcttcccttgtggctccccctcccagcaggcctcccagggagccggtgcgagcccctccgtccccacagataggcctgcccagagctgggggagaagctctttatttggagtcaggtgggtgggagcagggaagggtcatggctggagggtaggtccaggtggtccgggctctgtgtctggtggtagggtgggctctggaggtgcagacccgggggctgctgtgctgggaagaggagcagaggtcagggaggctgcagggtagggcagaggccaggcccagagctccctccccaggctctgcagcttccacatcggccactgctgggcagcctcggggctccagagcagcctcagctcctccaatgactgggcaggcctctgagcatccttggtgagtgggtgggggggagtagaccgagtggggacaggtgcagggggcgatgggccgagctgacacctgagggagccggagggaggcctcgctgtggaaaggccgaggaggaccctcactcgggctggcaggtgcaggaatggtaaaacaaaggacttcccgaatgtcccaggaattttgggtgggcagactctgaggtgccaacctcgtgcctgaccctgggggggtctccctggctgtgtgggatgggaagggccagagcagatgtaccctcgaaccccgggaacccaggactctgggcttgtcc

SEQ ID NO: 483636 - DNA, 1000 bp, Homo Sapiens; identical to SEQ ID NO: 120136

SEQ ID NO: 483637 - DNA, 1000 bp, Homo Sapiens; identical to SEQ ID NO: 120137

SEQ ID NO: 483638 - DNA, 1000 bp, Homo Sapiens; identical to SEQ ID NO: 309852

SEQ ID NO: 483639 - DNA, 1000 bp, Homo Sapiens; identical to SEQ ID NO: 120138

SEQ ID NO: 483640 - DNA, 1000 bp, Homo Sapiens
agggaggagactatggaaagttatcgcctccaggccctctcactcccttcctgcgccggccagggggccggcccgccgccctctccactccccgccaggcacgcagccacctgggcgaactcaccgcgctttcagctccttaaactcctcacgcactttgctcagctccagctgcaggcgggcgcgctccttggctactgagtcaagggtcttgcgggcatccccgagctcggcctcgtaggcggccttgatgccggacacctcgcggctgaccacctcttcagactcggtgatgcgaaggcgcagccctgcgttctccgtttccagcgagcgcacacggtcgatgtagaccgccaagcgatcattgagctcctgcaggtcctccttctcctgcagccgggtgatgcgggtgggcgacagcggagtggagctggcctgcgccccgctgcgggtggcgcgccgctgggacggggtctccatggccggcaggttggcagcgctgcccgcggggcaggggtcccggaaagggcgcggggctcgggtcgaaggacagagactgctcggagtcggagtgcgccggccggctggctcttcggcttgctcctggcaggcgtggggatctgggccgggcgctgtcggacctcgggatctgggttggctggtgtaggtgcggcgctcccgcgaacactgagtcaccgacgccggggcaaaggctctaataggtcctcctctgaagggaggaggggccactactcttaaaggggcagtcccagatccattgggggtgggggcgggagtggtgaggagggggaaggaccgttggggtgtggcggagtcgggccccaccctctccagcgcacccctaactgcgtgaggctcaagcttcccctctcttggctcctgcctgctcagcactgtcggctccaagcttgcccccattgcctcagaccttctgggctagagggcagagccaaggagggagagtgggtgggcaaaaggg

SEQ ID NO: 483641 - DNA, 1000 bp, Homo Sapiens
ctttttaacttctaaagcacattccatcaatgctttcacacttccaacttctcgcaacgtctttttactatttacatctgctcgccaagacaaattcctcaaaacacttgcaataacctgcaaattaatcaattttagattaatttatacataaaatcatactagttgcttttttgtttttaatgctagcagtaagaatagaaatctattaagaaagaaattctggctagccgtggtgactcacgcctgtaatcctatcactttgggaggctgaggcaggaggatctcctgagaccaggagttcaagaccttctgggtaacacagtgagaccctgtctctatgaaaactttttaaaaattagctgggcatggtggcatgcgcctgcagtagttctagctacttgggaggctgaagcaggaggatcccaggaacttgaggttactgtgagccataatcgcaccactgcactccagcctgggcaagagagggagatcctgtttttttttttttttaaattcctcctaaatgctactacagtgccaaaaagatttcctacagtctaaccacaatataattatttttctttttctagtgttaatggaactatcttttatacatgagatactaaatactgagcaacaatctaaatcaggatattagctgggtgtggtggcacacgcctgtaatcccagcattttgagatgctgaggtgggcagattgcttgagcccaggtgtggtgaaaccccgtctctataaaaaatacaaaaattcgtttggcatggtggtgtgcacctgtaggcccagcctcgagaggctgaagtgggaggattgcttgaaccctggaggcagaggttgcagtgagctgagattgcacaactgccctctaagcctgggtgacagagtgagaccctgcctcaaagaaaaagagaaaaaagaaaaacaggtgaaattctaaatagtacctgctgtaagtcttcactttcagattttagttgggc

SEQ ID NO: 483642 - DNA, 1000 bp, Homo Sapiens
gcagcctgcccttcaactggctttcaattttcagtatcttctaatcatggaaatgctaacacaattattaactttaaacaaatttttattacacaaaggttgtcacataattggatacttctctactttgtacacaattattctcactctccacagaaaggctgcttaacttctcatctggtggtggcaagcactaaaatcctgattttaacagaatagtagtaaaaatgcctcagtgatttaagttgaaagcagtacactggtacatggctcttgtacccagtatcaggaatgtacaaatgttttttattcaaaaatacaaaataaattatctgtaggcatggacaatgacagcagtaaaccattatatattttgtcaactgaaaccagtaactgatggttatagtgattttcagccagcctttttcttcattttctccaactgacttctctgaagttattggtgaggaacactgccttgggcttcctgtcacagttcattaataaaggtaaagcactagtctaggagttagaacatgccacctcccataccacctcccattccacccattgcacccattccagggtccttctcttctttaggaatttctgtgactacaacttctgctgtagttaacagagaggccacaccagcagcatccaataaagcagttctcacaacctagaaaaaaatttaattaattagttttcccttagtaaaatatgagcaagacttattgaaaatttctgtctgggcatggtggctcacacctgtaatccagcactttgggaggctgaggcaggtagatgacttgaggttaggagttcaagaccagcctggccaacatgatgagaccccgtctctactaaaaatacaaaaattagccaggcatggtggtgcatgcctgtaatcccagctactcaggagcctgaggcaggagaatcgcttgaacccaggaggtggaggttgtcactgcctgcactccagcctgggcgacac

SEQ ID NO: 483643 - DNA, 1000 bp, Homo Sapiens; identical to SEQ ID NO: 309856

SEQ ID NO: 483644 - DNA, 1000 bp, Homo Sapiens
ttttttttttgcttcaacgcatttctttatgtgatatgaagataaagattatccatacaaagttagaaaaattaagataaattatatattagtacaccttccaaccacattttatataaaaattcagaagtgtactattatttcaatctacaccataaaaatgcctggacttagcagataatcttctatctgtgatgtattttctcagtagaaggtttatttgttgcagtcactttttaagagtttaattttcattgttaaccttactgaatcatcagtaaacccagctgattgggacccactgtggttccattctcagtttctctatggcagtttgcagtttttcaaaggctttgtctagattatcatttatgatgatcaaatcaaaatagtggttgtatgctctctgaatccgtgcactttcatccactgttttcttcaagtcagagtcggtcagaagcttggtagtgattcctgcatccaccacagccttgtgcatggcacgtaacgtctctagctccggagccgcaataaataccacatagggcataaactctgatgtcctcaatactttcagtgcttgtgggttgacatccagaatgcaagtccgtccagtttggacaacctcaagaatagaatcaattttggttccatagagatttccttcatattccccatgttccaaatactttccagctttaatatctgcttccatctcagatcgtgacacaaacttatatgcctggccatctttttcatcttcccttggtttccgtgaagtaaatggcaccgtagttccaaatctagtgggattcaatactatgaacctgtttttcaagcttcttcggcctacaccttgagctcctatcaatactaatgtttttctctggaagggaggcattttggctacctcctcatatatctggatttcatgacgatcaaattctgcatttctggttgtgagatacatcatctttttcttttttttgctacttatagt

SEQ ID NO: 483645 - DNA, 1000 bp, Homo Sapiens
taggcacagctcttgcaactcttcgtaacggcagacgctggccctctcctacgacgcagtgacctccttggtgtcgtcctctccctagccctggtgcaggccaagcattttatacataccctcgctgccaggctgctcagagtcccgcccacatatgagacaggcactggctgaagacaggcaactctcgtcccaaccatcattcaccctgagtgacgtacttcatcctccaatgactggacaactgcgatgccttttcctcccttttcctgtacactcccagcaacaaactcctcatgataactgcacacaatctgaaaaccactgaaggacaagccaaccacagcagccaagcccactccttgcagcatgggtactggtggcacaccagacagtgacactgccccacaaaggcctgggcccgtgggggctgctgcctggcatgacatctctccagatttctggcttaaaaccaactttccatccgagaagcctcctcagtagttactctgctcatgagacagatctgggctccaagccaggaaaggtgaacagaaaccacaagtgtccagccctcggtgctggagtggacgttaattgtcagccaccagactgtcccggcacctacagagaatgtttcacagttctggcatttaaatcctttgatagtggattgtgctgctgttagccttagtttcagtgctttacaagtctcgcttattatctcattggtatttaggtatacaaaacagttgattattcaccacgccaatatctgggtctctgtatctcatgtagaacataagaaaatgggaactaatagggaactttatttatagcatgaaaataaacctggtggctggagtctgcttgtacggtccacatgtttcttcttttgcatgcaaggcttactcccccgccccccccccttggctttcagccaaaatggatattccatctgtaacagctcctacaggaagaactacttacttccacatgg

SEQ ID NO: 483646 - DNA, 1000 bp, Homo Sapiens
gatcatgccattgcactccaggctgggtgacagagtgatatcctttttttaattttcaattttttaaaaaaaattaataataaacgtagagatggaagcatccaggacacaagtgcaaaattcagctttcaaatcctccgcatccagggagctcagagagagacccaaatgtccacatggggagggaagaaaagagaacaagtccagggatttcttttccttagggccgctacagcacgtggcctcagaactataaagccttacaggaagctaaatagacagctcttggttacttagctggtggatgccagctaatcccacagcagcctggtggaatgaggacggggctcacccctgcctctgtcattcactagctgtctgaccctggacatattaccacccctcagagcctcaataccttcacctgtgaaatgtggaaaatgatgccccacacatgttgtttggagaattaaataagacaccacatgtaacagtcattcattcctccctcctgccactgttcattgtcacctgctgccacttgtgactttcacagtgcctatataaagcaggctttaatagatgttggtacccctgtcaatcctagaccacatttggttttagagtggattttttttttttttttgagacggagtttcgctcttgttgcccaggctggagtgcaatggcatgatctcggctcactgcaatctctgcctcccggattcaagctattctcctgcctcagccttcctgagtagctggcattacaggcatgtgccaccaagccaggctaattttgtatttttagtagagacagggtttctccatgttggtcaggctggtctcgaactcctgacctcagatgatctgcccacctcagcctcccaaaatgctgggattacaggcgtaagccaccacgcctggtctggagcatatttttatgcctacatcttaattagaatgaagctggtgttccagagatgagcctttcactggt

SEQ ID NO: 483647 - DNA, 1000 bp, Homo Sapiens
ggatcccctggtcatggtccatgctgcacccacttccatttccctgtgaggtgggtcccccaggaagaggctgtgctgagagtaaccaaacctgtgggtcagaatgtcagtggtctgctgagagtctgagaatagtgggggaaacctacccatggaggaagtttctgtcccagtgaggatgaatctctgcccttccatgatgaggcttaatgtggtcaatgtgtcatttagtggcactttgatcacctaaagaaatagtgcctaagcagggcacatcagggcctatccgggtgtctaatcctgacaagttggatattcagaggtggcagcagctagttcggccttggtaggtgggagtctcaccttttggaggctacctatgggtccagcagcactgactcccaccgaccaaggccactgagtgacctggcaggatgggcacataaagggagctattgtgattcctgcatgcatgttcccaccctgcaaggcctgagatggcccccagtgaaggctggctaacttccatttgtctgcttggttgttcagtgccacctcaggggcaggtattttctgggcagatggggtgttaacttggggtttgggctcattccacatggaccatttccatctcatgatggacacttgggcctgtccaatcataactctgtaggtcacacagaaccaattcatacaccacgtggaattacgtggtctcagtgtcctgtggcagaattctatctgatcaggccacaacactagttgctagagaggggcatatatttctctatggatgacatgaacttactccagaatccagccctccttgtgactttcccgactgatgctcagttcactccatcctgcatctttccccagccctgccaccttcagcaccagggggtctgagggatggtgctgcctgcaccacagcctggatctgctcagagtcctttcctgtgtaggcccacttgaagctggcatcctccatgtcacccaa

SEQ ID NO: 483648 - DNA, 1000 bp, Homo Sapiens; identical to SEQ ID NO: 309857

SEQ ID NO: 483649 - DNA, 1000 bp, Homo Sapiens; identical to SEQ ID NO: 120139

SEQ ID NO: 483650 - DNA, 1000 bp, Homo Sapiens; identical to SEQ ID NO: 309859

SEQ ID NO: 483651 - DNA, 1000 bp, Homo Sapiens; identical to SEQ ID NO: 309860

SEQ ID NO: 483652 - DNA, 1000 bp, Homo Sapiens
gggtttcactgcattttattcttcccactcccatcatctgatgggggatgagtgttcagggaagctgccacaagtgaggtgaagaaaaaaaagacactaggggttagagaagcctcgtacagagttatcaggcctgtgtagtagagagttggttttgccttcaacctaaaagcaaagttgtgaaagagaagcagaattccaaagtcccttattcaggtgagggtcaatggggaaaagtccacaactagagtggacttagggagtgcccgagtttctcctgatctaagagagcatgttttaaagccatggtgagctgctgggggtgggacaagggtgtaagggccttgaacacccagtttttggtggaagggttcagaccttggcttgtgattgctgagatgaattggcattggaaacagggcacgggactttgtctgtgtcttgaaaatgtccctggcattccctgggtcctgaggggcctaagcagaaatcctctgtccccacctaaccaggactgtaccccctcctccactgggctgtacccactcaagcgtactgccagatggaccagagcataaccagggtgatgctgtaggccagcaccgctagcaggtaaatgtggaatagcagcttgtccagcacggagcccacgcgcagccagtctcgggccacctctcggatctcatcccgcttttccaggaattgccggatggaggacagctcctgcagcagcccacacaccgccagcgaggcctcccgaggtggtgggggagggctacatctgtccctcgggctcttctcgaagtcctggggtcctcccatgtggctgcagtggtttcccatggctgcagtggtttcccatggctggaagaagggcagggcattggcaagagagggagaccccgggtggtgacctgaacatggttccttatgcttctatagcctgtaaatttttgttgggaataactttttttttctcactctgtcacccaggctggag

SEQ ID NO: 483653 - DNA, 347 bp, Homo Sapiens
ccttggccccagacgtccatgtagtagtagttatttactcggtcgaaccataattggctcgcacagtaatacacagccgtgtcctcggctctcaggctgttcatttgcagatacagagagttcttggcgttgtctctggagatggtgaatcggcccttcactgagtctgcgtagtatatgtaactactactactactaaaggatgagacccactccagccccttccctggagcctggcggacccagttcatgctatagctactgaaggtgaatccagaggctgcgcaggagagtctcagggacccgccaggcttgaccaggcctcccccagactccaccagctgcac

SEQ ID NO: 483654 - DNA, 334 bp, Homo Sapiens
tgaggagacggtgaccagggttccctggccccagttggagttcccatccctgacacagtaatagacggccgtgtctgcggcagttacagaggtcaactgcagggagaactgattcttagacgtgtctattaaaatggaaactcgactgtggagggacgggttgtagttggtgctcccaccataataaatgtacccaatccactccaggcccttccctgggggctggcggacccaaccccagtagtaatcagcactagtgacggagccaccagagacactgcaggtgagggacagggtctgcgaaggcttcaccagtcctgggcccgactcctgc

SEQ ID NO: 483655 - DNA, 1000 bp, Homo Sapiens
atttaaagtaaatatgcctcatgttactacattggcaggagtgttttaaaaccagtacaacaaggggtaccagccctccaaagccatgctggctatgtatagcaggctgatggtcctggtgtccctgctaaaggtacaactgcccctgggccagggaatagcacttctgtacaactggacacatgctgggaagtcactgtctccaatgcttcacgaaagacacattttgctgttttagcacatatcagaaaaccaactttatatgattgcaagatatgaaaaacataaatagccttggctttgttaagttcccaatggtatggaaatttcataaaatttttagaaaatgctattgtcaaagatgcatactgaccaattttttttttttattttttatttttatttttttttagatggagtctttctctgttgcccaggctggagaacagtggcatgatcttggctcactacaacctctgcctcctgggttcaagcaattctcccacctcagcctcccaagtagctgggactacaggcgcccaccaccacgcctggctaatttttgtgtttttagtagagacggggttataccatgttggccaggctggtctcgaactcctgacctcgtgatccacccacctcagcctcccaaagtgctgggattagaggcgtgagccaccgcgcccggccctgagtatttttgggtgaaatgacagatgcctcggatgttttcaagtaccatagtatgaaaacgctgggtaaagataaagaaaacaagatcgcaaaatgtaggcaattgttaaagctggctgatatagtggttcattaggctatttttctctacatttgaaaatctgttataaaaaatttataagtatataaagggagaatctatataattcataatataaatttatatttatattatattatacctggggggggccaggcatggtggctcatgcctgtaatcccagcactttgggaggctgaggtggga

SEQ ID NO: 483656 - DNA, 1000 bp, Homo Sapiens
gagaatagtttaaattagaatcttagctttgggtgctaatggtggagttaaagactttttctctgatttgtccttggaaaaaggttttcatctccggtttacaagactggtgtattagtttatactacaaggacaggcccatttgagtattttgttttcaattagggagatagttggtattaggattaggattgttgtgaagtatagtacggatgctacttgtccaatgatggtaaaagggtagcttactggttgtcctccgattcaggttagaatgaggaggtctgcggctaggagtcaataaagtgattggcttagtgggcgaaatattatgctttgttgtttggatatatggaggatggggattattgctaggatgaggatggatagtaatagggcaaggacgcctcctagtttgttagggacggatcggagaattgtgtaggcgaataggaaatatcattcgggcttgatgtggggaggggtgtttaaggggttggctagggtataattgtctgggtcgcctaggaggtctggtgagaatagtgttaatgtcattaaggagagaaggaagagaagtaagccgagggcgtctttgattgtgtagtaagggtggaaggtgattttatcggaatgggaggtgattcctagggggttgtttgatcccgtttcgtgcaagaataggaggtggagtgctgctagggctgcaataatgaagggcaagatgaagtgaaaggtaaagaatcgtgtgagggtgggactgtctactgagtagcctcctcagattcattgaactaggtctgtcccaatgtatgggatggcggatagtaagtttgtaattactgtggcccctcagaatgacatttggcctcacgggaggacatagcctatgaaggctgttgctatagttgcaagcaggaggataatgccgatgtttcaggtttctgagtagagaaatgatccgtaatataggcctcgcccgatgtgtaggaagagacag

SEQ ID NO: 483657 - DNA, 1000 bp, Homo Sapiens
gagaatagtttaaattagaatcttagctttgggtgctaatggtggagttaaagactttttctctgatttgtccttggaaaaaggttttcatttccggtttacaagactggtgtattagtttatactacaaggacaggcccatttgagtattttgttttcaattagggagatagttggtattaggattaggattgttgtgaagtatagtacggatgctacttgtccaatgatggtaaaagggtagcttactggttgtcctccgattcaggttagaatgaggaggtctgcggctaggagtcaataaagtgattggcttagtgggcgaaatattatgctttgttgtttggatatatggaggatggggattattgctaggatgaggatggatagtaatagggcaaggacgcctcctagtttgttagggacggatcggagaattgtgtaggcgaataggaaatatcattcgggcttgatgtggggaggggtgtttaaggggttggctagggtataattgtctgggtcgcctaggaggtcaggtgagaatagtgttaatgtcattaaggagagaaggaagagaagtaagccgagggcgtctttgattgtgtagtaagggtggaaggtgattttatcggaatgggaggtgattcctagggggttgtttgatcccgtttcgtgcaagaataggaggtggagtgctgctagggctgcaataatgaagggtaagatgaagtgaaaggtaaagaatcgtgtgagggtgggactgtctactgagtagcctcctcagattcattgaactaggtctgtcccaatgtatgggatggcggatagtaagtttgtaattactgtggcccctcagaatgatatttggcctcacgggaggacatagcctatgaaggctgttgctatagttgcaagcaggaggataatgccgatgtttcaggcttctgagtagagaaatgatccgtaatataggcctcgtccgatgtgtaggaagaggcag

SEQ ID NO: 483658 - DNA, 1000 bp, Homo Sapiens
gagaatagtttaaattagaatcttagctttgggtgctaatggtggagttaaagactttttctctgatttgtccttggaaaaaggttttcatctccggtttacaagactggtgtattagtttatactacaaggacaggcccatttgagtattttgttttcaattagggagatagttggtattaggattaggattgttgtgaagtatagtacggatgctacttgtccaatgatggtaaaagggtagcttactggttgtcctccgattcaggttagaatgaggaggtctgcggctaggagtcaataaagtgattggcttagtgggcgaaatattatgctttgttgtttggatatatggaggatggggattattgctaggatgaggatggatagtaatagggcaaggacgcctcctagtttgttagggacggatcggagaattgtgtaggcgaataggaaatatcattcgggcttgatgtggggaggggtgtttaaggggttggctagggtataattgtctgggtcgcctaggaggtctggtgagaatagtgttaatgtcattaaggagagaaggaagagaagtaagccgagggcgtctttgattgtgtagtaagggtggaaggtgattttatcggaatgggaggtgattcctagggggttgtttgatcccgtttcgtgcaagaataggaggtggagtgctgctagggctgcaataatgaagggcaagatgaagtgaaaggtaaagaatcgtgtgagggtgggactgtctactgagtagcctcctcagattcattgaactaggtctgtcccaatgtatgggatggcggatagtaggtttgtaattactgtggcccctcagaatgatatttggcctcacgggaggacatagcctatgaaggctgttgctatagttgcaagcaggaggataatgccgatgtttcaggtttctgagtagagaaatgatccgtaatataggcctcgcccgatgtgtaggaagaggcag

SEQ ID NO: 483659 - DNA, 1000 bp, Homo Sapiens
gagaatagtttaaattagaatcttagctttgggtgctaatggtggagttaaagactttttctctgatttgtccttggaaaaaggttttcatctccggtttacaagactggtgtattagtttatactataaggacaggcccatttgagtattttgttttcaattagggagatagttggtattaggattaggattgttgtgaagtatagtacggatgctacttgtccaatgatggtaaaagggtagcttactggttgtcctccgattcaggttagaatgaggaggtctgcggctaggagtcaataaagtgattggcttagtgggcgaaatattatgctttgttgtttggatatatggaggatggggattattgctaggatgaggatggatagtaatagggcaaggacgcctcctagtttgttagggacggatcggagaattgtgtaggcgaataggaaatatcattcgggcttgatgtggggaggggtgtttaaggggttggctagggtataattgtctgggtcgcctaggaggtctggtgagaatagtgttaatgtcattaaggagagaaggaagagaagtaagccgagggcgtctttgattgtgtagtaagggtggaaggtgattttatcggaatgggaggtgattcctagggggttgtttgatcccgtttcgtgcaagaataggaggtggagtgctgctagggctgcaatgatgaagggcaagatgaagtgaaaggtaaagaatcgtgtgagggtgggactgtctactgagtagcctcctcagattcattgaactaggtctgtcccaatgtatgggatggcggatagtaagtttgtaattactgtggcccctcagaatgatatttggcctcacgggaggacatagcctatgaaggctgttgctatagttgcaagcaggaggataatgccgatgtttcaggtttctgagtagagaaatgatccgtaatataggcctcgcccgatgtgcaggaagaggcag

SEQ ID NO: 483660 - DNA, 1000 bp, Homo Sapiens
gagaatagtttaaattagaatcttagctttgggtgctaatggtggagttaaagactttttctctgatttgtccttggaaaaaggttttcatctccggtttacaagactggtgtattagtttatactacaaggacaggcccatttgagtattttgttttcaattagggagatagttggtattaggattaggattgttgtgaagtatagtacggatgctacttgtccaatgatggtaaaagggtagcttactggttgtcctccgattcaggttagaatgaggaggtctgcggctaggagtcaataaagtgattggcttagtgggcgaaatattatgctttgttgtttggatatatggaggatggggattattgctaggatgaggatggatagtaatagggcaaggacgcctcctagtttgttagggacggatcggagaattgtgtaggcgaataggaaatatcattcgggcttgatgtggggaggggtgtttaaggggttggctagggtataattgtctgggtcgcctaggaggtcaggtgagaatagtgttaatgtcattaaggagagaaggaagagaagtaagccgagggcgtctttgattgtgtagtaagggtggaaggtgattttatcggaatgggaggtgattcctagggggttgtttgatcccgtttcgtgcaagaataggaggtggagtgctgctagggctgcaataatgaagggtaagatgaagtgaaaggtaaagaatcgtgtgagggtgggactgtctactgagtagcctcctcagattcattgaactaggtctgtcccaatgtatgggatggcggatagtaagtttgtaattactgtggcccctcagaatgatatttggcctcacgggaggacatagcctatgaaggctgttgctatagttgcaagcaggaggataatgccgatgtttcaggtttctgagtagagaaatgatccgtaatataggcctcgtccgatgtgtaggaagaggcag

SEQ ID NO: 483661 - DNA, 1000 bp, Homo Sapiens
gagaatagtttaaattagaatcttagctttgggtgctaatggtggagttaaagactttttctctgatttgtccttggaaaaaggttttcatctccggtttacaagactggtgtattagtttatactacaaggacaggcccatttgagtattttgttttcaattagggagatagttggtattaggattaggattgttgtgaagtatagtacggatgctacttgtccaatgatggtaaaagggtagcttactggttgtcctccgattcaggttagaatgaggaggtctgcggctaggagtcaataaagtgattggcttagtgggcgaaatattatgctttgttgtttggatatatggaggatggggattattgctaggatgaggatggatagtaatagggcaaggacgcctcctagtttgttagggacggatcggagaattgtgtaggcgaataggaaatatcattcgggcttgatgtggggaggggtgtttaaggggttggctagggtataattgtctgggtcgcctaggaggtctggtgagaatagtgttaatgtcattaaggagagaaggaagagaagtaagccgagggcgtctttgattgtgtagtaagggtggaaggtgattttatcggaatgggaggtgattcctagggggttgtttgatcccgtttcgtgcaagaataggaggtggagtgctgctagggctgcaataatgaagggcaagatgaagtgaaaggtaaagaatcgtgtgagggtgggactgtctactgagtagcctcctcagattcattgaactaggtctgtcccaatgtatgggatggcggatagtaagtttgtaattactgtggcccctcagaatgatatttggcctcacgggaggacatagcctatgaaggctgttgctatggttgcaagcaggaggataatgccgatgtttcaggtttctgagtagagaaatgatccgtaatataggcctcgcccgatgtgtaggaagaggcag

SEQ ID NO: 483662 - DNA, 1000 bp, Homo Sapiens
gagaatagtttaaattagaatcttagctttgggtgctaatggtggagttaaagactttttctctgatttgtccttggaaaaaggttttcatctccggtttacaagactggtgtattagtttatactacaaggacaggcccatttgagtattttgttttcaattagggagatagttggtattaggattaggattgttgtgaagtatagtacggatgctacttgtccaatgatggtaaaagggtagcttactggttgtcctccgattcaggttagaatgaggaggtctgcggctaggagtcaataaagtgattggcttagtgggcgaaatattatgctttgttgtttggatatatggaggatggggattattgctaggatgaggatggatagtaatagggcaaggacgcctcctagtttgttagggacggatcggagaattgtgtaggcgaataggaaatatcattcgggcttgatgtggggaggggtatttaaggggttggctagggtataattgtctgggtcgcctaggaggtctggtgagaatagtgttaatgtcattaaggagagaaggaagagaagtaagccgagggcgtctttgattgtgtagtaagggtggaaggtgattttatcggaatgggaggtgattcctagggggttgtttgatcccgtttcgtgcaagaataggaggtggagtgctgctagggctgcaataatgaagggcaagatgaagtgaaaggtaaagaatcgtgtgagggtgggactgtctactgagtagcctcctcagattcattgaactaggtctgtcccaatgtatgggatggcggatagtaagtttgtaattactgtggcccctcagaatgatatttggcctcacgggaggacatagcctatgaaggctgttgctatagttgcaagcaggaggataatgccgatgtttcaggtttctgagtagagaaatgatccgtaatataggcctcgcccgatgtgtaggaagaggcag

SEQ ID NO: 483663 - DNA, 1000 bp, Homo Sapiens
gagaatagtttaaattagaatcttagctttgggtgctaatggtggagttaaagactttttctctgatttgtccttggaaaaaagttttcatctccggtttacaagactggtgtattagtttatactacaaggacaggcccatttgagtattttgttttcaattagggagatagttggtattaggattaggattgttgtgaagtatagtacggatgctacttgtccaatgatggtaaaagggtagcttactggttgtcctccgattcaggttagaatgaggaggtctgcggctaggagtcaataaagtgattggcttagtgggcgaaatattatgctttgttgtttggatatatggaggatggggattattgctaggatgaggatggatagtaatagggcaaggacgcctcctagtttgttagggacggatcggagaattgtgtaggcgaataggaaatatcattcgggcttgatgtggggaggggtgtttaaggggttggctagggtataattgtctgggtcgcctaggaggtctggtgagaatagtgttaatgtcattaaggagagaaggaagagaagtaagccgagggcgtctttgattgtgtagtaagggtggaaggtgattttatcggaatgggaggtgattcctagggggttgtttgatcccgtttcgtgcaagaataggaggtggagtgctgctagggctgcaataatgaagggtaagatgaagtgaaaggtaaagaatcgtgtgagggtgggactgtctactgagtagcctcctcagattcattgaactaggtctgtcccaatgtatgggatggcggatagtaagtttgtaattactgtggcccctcagaatgatatttggcctcacgggaggacatagcctatgaaggctgttgctatagttgcaagcaggaggataatgccgatgtttcaggtttctgagtagagaaatgatccgtaatataggcctcgcccgatgtgtaggaagaggcag

SEQ ID NO: 483664 - DNA, 1000 bp, Homo Sapiens
cctgtgagcaggcagtggttggtcccagcttcattcaccaggcacgccttgaccttcagcagctgcatttagcctggctctggtccttggtcttgcaatgcccttgaaggagctgggtctccaggcactaacctctacctgaggctggcgcttggcctttgattccatcagcttggctttgagggctgttttctgagagtggagcgaagattgcctaagagaagagatgaaataaagagtcatttgggtagattagcatcagaaagttttcctattctctctgcaggaagggaatatacactggatggatgttactgtctcatcttctaacctcttctctttcaagtaaaacagagataatcttctatgcagatgctgtgttttaagagggcgaggttttgatttaactggaaggaaagtatctcaggatgcctgtcttctgtacctagtgcatccctatggtgtaggaaaatcctgctttcttaaggtagagcagtgattttcaggtgattttgtgcctcccttccactctcatttggcaatatttggagacatttttggctgacataataaggggtagggggtgtactattggtacctactaggtagaggccataaacttccataaacccacaggacagctccccaagaattatccaaccaaaaatgtctagagtgccaaggttgagacactctgccttaaaacctgacatttggatgttaggcatttcaaaagtttcaggaaactgcttgaattagggtgaatctgatctaattttaattccctgtaacattaattctgccactttgattttttttttaattcaaacagtttctatttgcagagtcatagattttagagctagacgataagtaccttagtaatcaccaactcccttgctttgcagaaaaaaatgaggcttagagatagatacttttagaggaatgacttatctaaggttacatggtgagctttgagacaacctaagactgagactca

SEQ ID NO: 483665 - DNA, 1000 bp, Homo Sapiens
tttttttttgagacagggtctcaccctgtcacccaggctggagtgcagtggtgccatcagggttcacaggagcctcaacctcctgggctaaagccatcctcccgcctcagcctcccaagtagctgggactacaggtgtgtaccaccatgcccagctaattgttttccagagacaaggtctcactatgttgcccaggctggtcttgaactcctgagctcaagtgaccttcccaaagtgctgggattacaggtgtgagccctgcacctggccctggtttaataagaaccagagccacaaccctctcagagtgacccagtggagccccagttacctgcctcactctgagagtgaaattaggcagcgagaaaggaaaagccagtttttcaaccagcaggcaactttcccctctcaacagggacactggggacttatgtgccagcccaggctgaactaactactgtgtgacttactgcctcagctaaagcttgcagctcaagaaggaggatgccccttccttcgcgaaccctccgtgggtctggcaggcacccagcctctgtgcatggcctgggaaggaaccactgccctgggttagagaatgccacgtgaacacaagaaaaaggatgcggcaggagttaaccatcctccccttctgtccctccaggaggcagggaaggatgcggcaggagttaaccawcctabcccttytgcccccccaggaggcagggaggaacatctcaggctgraatgctggccttccccaaatggcccacagggaaaggctggggaaaaggagctggattcactgcccagtacttgtctcatttcccmaagactttatccaattctcagccactgagtagggtaccacctgggtcctagtgtgctagatagtttcaggcaggagcctgggagcaagggctgtgctggccctcttggcttatcagggggcttccctggtcatcctccagcagcaactgtcttagcgctgggtggccagcgt

SEQ ID NO: 483666 - DNA, 1000 bp, Homo Sapiens
gatcctagtctcactttttcctgtatctggcaatacagcaggtttttgttctcttttggttctcttttcactttggttttgattagggacactgtgtttgttggggtaaaaggctatgcatgtgaggggagctgggatgaagtcgcaataagcatgaccacattcagcttagaaccttctttattaaggaaggtctttcaggcactttcattaacaggcacatataagcttagcaagagcacctttcaaagtcacagttccaatggtttttgtaaggtcaaccagaggcagagaacacaatcatggtggcttaccgtcaaaatcatgacaagttgtcaacctaatgccttctgtcaaacataaccaccacccactctgcttctgtcctgtgaggaatgacgggaagtagggagtcaagacttgatattaatgtagatcgcatgtgacacttgcgtggccagcagacaaggccccccacccatgcccaggcttggacaaaatggtggctatgttttctgtgccaaacctcctcatctctgccatgtctagcctagaccttgaagtgtctgatcctccccggacatggaggaaccactggcccagcagcagcaccaacactaggctgcaccactgtgcgtgttttccgggggtgcgacacttctcctgagggtgaccccaatgagaccacacccatgaaggtgtggcgcaggtcgtagtgcgcccggtgcaactggtgtcctggaggagctgccagtaacacatgggagtctgggggtgagccagctggagggagtccaggtgcgccaagtggaggggacggaggtgcatctgggtccaccacgggggtggggactgcttcattggcaccttctggttggggctgtgaggtcacgggctggaaaaaggaccatttccttcagttagtttgcttcctcctcccaggcaagacaacccacaggcccaggtggcactggcacccaatttcctcacattatacatt

SEQ ID NO: 483667 - DNA, 1000 bp, Homo Sapiens
tttttttttccaactttttacattttatgtttatttaaggagcgggtcttctattggatctgccctttcggttgaaaaatgcattttttacctttttccatgaagctgatttgtcaggcttcaaaatatcttaggtggttttgtatcattttcttacaggtagaatagagccactgggacattaaatgatgtacatttatattttgttttgtttagtcttattgagcgtgtttgcttttttgctctggaaaaattattaataataatttcaaaggtgtcaaaacaataaaagccattctacttctaatttcttagatttcacattaaatgctaagaggggttcagaatagaaaatgataaaggtcaacataaatatcacagcagactaaggaacaagggctacagaaagtcaagaaaccattactctggggccgggtgtggtggctcacacctgtaatcctagcactttgggaggccaaggcaggtggatcacctgaggtcaggagttcgagaacagcctgaccactatggtgaaaccccatctctactaaaaatacaaaaatcagccgggcgtggtggcattcacctgtagtcccagctactcaggaggctgacacaggagaatggcgtgaacccaagaggcagaggttgcagtgagccgagatcgtgccactgcactccagcctgggtcacagggcgagactccatctccaaaaaaaaaaaaaaaaaagaaaccatgattccggtggccctattaaaaaccatggccaccacgggcgaagaaaaagaaatccagccaccaagagggagcctaggcgcatctttttaagcaatgaaattacctagccccatatgtaagctaacaacatacaaatgccttttttaaaacctacatcaatcttaatttgtaaaaatatttggtatggattttttttttttagtacaagaattaaaaaaaaatcctccattgggaaaaaactgtggttcatttggagctatt

SEQ ID NO: 483668 - DNA, 1000 bp, Homo Sapiens; identical to SEQ ID NO: 120140

SEQ ID NO: 483669 - DNA, 1000 bp, Homo Sapiens
tttttttttttttttttttttttagaaaattttcttgagaactttattcagcaaaaaaatcctccaaatgattcaaacaggactgtatactcttcctctccctccacgggtgtatatgtgtgtatacatatagatattatactagcaatttagaaaatttcctgagcctcctgtctcctttctacttatattttaactaaaggttacagagaaatagctggagcagtttcaaaagcctgtctccaataacatatcagcaattgaggctgggaggcagtattctcttcccacttcctgaggattttaaatataattatgctaatttttgcctttgcctcctgattcaactggagtctttgagttcaccactcaaaagctttccttaaccagagtcacctgataaggtgagtcagaagtctgcagaatcacttccaatgacgaaagcctgactgtttcccagcctcaaaaaggatacagcctagtagtaatgtgaatcatgactggtagaggggactgagcctgacgttgaacggcctggaagtaacacagcagtattcaaacactggagggttggggagggatccggaggtggaatgggggagacacacttgtagcgtggtagtccaatttttttgtagtctgatgggaggagaatattaatttggtccacagcaagccagactatatgtgtaataaaggaaggactgcatggatcctttatcatacactcctctcctccatgcaccaattcctatgccaaatcctgccaaagacagaaatacacaaaaagcttgaaagtgctcaatctgagagcaagttaagctgcaggaaagcagctgcagagaagtatattaagacagggcatgggaaagagggaatcaaagcaagtgccccactgtcgccctcattactttcctgttgctacagatagatgatagctgcactcacacagcaaagcagatggctgagcaaactgaagcccagacttcagagtaagtag

SEQ ID NO: 483670 - DNA, 1000 bp, Homo Sapiens; identical to SEQ ID NO: 120141

SEQ ID NO: 483671 - DNA, 1000 bp, Homo Sapiens; identical to SEQ ID NO: 309874

SEQ ID NO: 483672 - DNA, 1000 bp, Homo Sapiens
gccccccttcacgtggcccccagctaccctgagagtgtcccctgagccccaataaagagagagactatgacttattctatttaatatccatttatcaacattttgtcacaataataataaaaataatatctgttttaaaaatccacagggaattctcaagggaggagcttgtcttgtttctcgcccctcacatttgggaactcctggcctaggcccagtctctttggcttcctgccgccaggtccagcccctcttagtgcctgaagtggggtcttctggacccatccttgcccacagagtacagtgaacacaatgccctgggggtctgtggccaggggggagtcgagatcactgggggcctcaaagggtcagggattggggagctagtgaggtggagagtgggcggtgggggagttgtaagataagagtgggaatactgtatttatgtgggatggaaaacacgtgaacaggcccaggcagcctctagagggaggggcaggtctggagcaaagagcggctgagggtggggcagaggggaccgggtgcccagagagctgtcgaggggagccggcagcctgggacgactgcggggagaccagggcccctcagtgaacctggaagagtccgaagtaggtgaggaagggggcagccttgagatgggcccaggggagggtgcggatccgcagggaggaccctggccgcagggccaacagaccagacacctggcagaggcggagctggggcccgagggaactcgccgcagtggctgagaattcctccaggcagcgcagggccagcacaccatccaccagcaagtccagcttcaggtagacagccttcccctcatcaaagtgcacctggggtggggacaacaggccgagtccaggcctctgcctgccctcgcctcaatttccaatttcctcagcgacgcaggcatcccatcccacccaaaccccaactcaccctcccagccctgtagcttgtcccccactctcctggc

SEQ ID NO: 483673 - DNA, 1000 bp, Homo Sapiens
tctagattataagattacttgaaagcaagttacatgtctttccttcaataaacatctactgtgcaagtacaatgtggcccatattttacaacgtgctgccttgtatatctttttttttttttttttgagacggagtctctctctgtcacccaggctggagtgcagtggtgtgatcttggctcactgcaagctccgcctcccgggttcacaccattctcctgcctcagcctcccaagtagctgggactacaggcgcccaccaccatgcccggctaatttttttgtatttttagtagagacagggtttcaccatgttagccaggatggtctcgatctcatgacttcgtgatctgcccacctcgacctcccaaagtgctgggattgcaggtgtgagccaccgcgcccagcattttttttttttttttttgagatggagtctcacactattgcctgggctggagtgcagtggtgccatcttggctcactgtgacctgtgcctcctaggttcaagcgattctcctatctcagcctcctgagtagctgggattacagatgccagccaccacgcctagctaatttttgtatttttagtagagatggggtttcatcatgttggccaggctggtctcgaacccctgacctcaggtgatccacctgtcttggcctcccaaaagtgctgggattataggtgtgagctgctatatatttgttggcactttcagtaatagaggctgttaagcacaacacctcaagggctgggccagttcaaggaccgatgagaatgcagacaggaactcagataagggtactgtactttcttgttggtttactatggaaccagcacacaggcagcagaaaggataaatatgagattaagaaccacatgatgttaaaatagatgtggctactagggcctcccatttccctgacaagaggcacacctcaaggctggggcctgtgcagtgagaaatccaccagcagaatgaagcctagaaccttgg

SEQ ID NO: 483674 - DNA, 1000 bp, Homo Sapiens
cctatccaacataggatgtaatttcctggtcgtattaagaagctgtgtacttgtacgtagcaacaggccagacaaaagagggttatggactgctaaggcttatcccagttgagtcttcacctcccatcccaatacacctatatccatagccctccctgtccccggactagccaggccaaacaaccacagaagcctccatccagggttcttccctcctccttccaggtccccaccagctctactcacattgtacagcacagtggtccacccttccatggtgatgcactggaagacagtcagcacagcaaaaaggatgttatcaaactgggtgatcccatcattggggccgatccagtccttgcattcataaccagctgggcagccctgcacaccacatgggtgaggggggtcaaatccttctagaatacctgcagacacatttggagggtaggagataaatcacatggtgtttcgcatgagctggaaatgaccccaggaagccataggcaagcaattccattcccccacggaaagaggcctgcccttttttgtctcaggctccctctcctccctggcctctctgcacctcccagctcacatatcatgtgttcmatccaatgtttcccagtctcctgaaaaatggagcctctcctccacatagtcccctgctctctgcaagcttcatcctctaccctcacctgaagtaccacaggaattaagaggactgaatcacacggcacactttgaggaaaaggcaaagtgaggttttctggcttcagactccaggatgagccctgagttcttcctgggtttcttggggacagttataaactatggtccttttaggggggtttaactccttgtttttccagcgtggattcctggttttgaataaaagataaaaataaaaaatagaaatccaaggtggaaagtgttcttttaaggttcttttcataaaaagcatggtacttatttggaattcttcagcctgcctcccatc

SEQ ID NO: 483675 - DNA, 1000 bp, Homo Sapiens; identical to SEQ ID NO: 309875

SEQ ID NO: 483676 - DNA, 1000 bp, Homo Sapiens
tccttcagcacagccatgcacaccaggccattgccgaagacgatggccaggatgagcgcgcagtaggagagggcatagtaggcatgtgggcgggcctggctggcacctgtggagttctctgccccacaggtgtagttcaggtggctactcagctggctcagagatgccatagcccagagggaggtgcgtgatgccaaggggcttcctgtgaggagacagaaaacaatattaataaaatcagactctttggggcttggttgcttagttacatttttttatttattgcatcagcaaatatttattgagcattttctatatagtaggcactgttgtgagagttggagatagagcaatgaacaaaacagataaaattttaattccttccctttgaagctcccattctagaggagaagacagataataaacaagataaataaaagatgtggtgtgttcaataatgatacgtatattggagacaaatcagagaggcaggtaagtaacgggtgaagattgtgcgtatgtgagtgagtatctgagtataatcaggaactcctcatggagaaatcagcaattgagtcttgacctggaggagatcaggaagcagaccatgcagttatcagatgtgatagcagtctgagcagtgagaacaacacgggccagcaggaagggctagcacatagaagtcataggagggagtctggtgaggctggagccaagtgaggcaggagtagaataggagggtgtgaggtagacagattgtgcagggctattgaaagtaccatgcttggactctgagtgagatgggaagctgttgcaggattacaatcccagctctgctgcttcctaactctgggaccttatgcatattactttacctctctgagctccagattcttcccatgtaaaatgtgggaataatgaaacccatctatcttagtccattttgggttgctataacagaacaccttgagtctgggtaatttataaagagcagaaattt

SEQ ID NO: 483677 - DNA, 1000 bp, Homo Sapiens
tgaagaggccagcaaggaaggcagtgcgctaccctggaggtgggctgcagccttgcaaggactgttccaggcctgattcctcgagggtggggttagggacttctcaaagtcttccagagctctccagagctttccaagaggaggacaggagagattgggccaagcagcgggcagaggagcctcttagccttggggttgaagctgtgaggtatctcggatgagggcagtgagtggggcagttgagggagtgagtagaaggtgtcctcatgtcagctgtggagaaggctgccaggtactcaggaggtgtatgcatgggggaagggtgggccaggggcaggtgccaaggctctcatctttccctgtttggtgggcagcatgaggaggatgtggcaatggggtggggtccagactgacacagggcagcccccaagggtggctgctggcacttttggtggttgttgctgtggtacctacgtggaaggatggctggggggcagagtgaagatatgctaggaagagaaagtggggaccgtgtatgcaagaagggggcaaaactcaaacacacacacaagcacgcatacacgtgcacacatataaacatgcgcatgcacatgcactgccttccggctgacttctggcctcctcggtccccttcagagccatccagactgacaggtgtgacaggtagaaggtgctgtgagcacagtcagcactgcctggccaggagatgacagaaccatctggggacaaggccctacgggtgtccaggcggagaacaggccagaacgactctagtcttcaggccatatcatcaggctggggtgctcaccacttggtgggtgtggggaaccccaagaaagcaagacattgcagcacacaaagcaggtccccaagtttattggaaaaggggagacaagaggccagagaggcagggggaacagtctcacagtgcttcttccagggaagcaaggcccttctccccgggaggggctgaaggctg

SEQ ID NO: 483678 - DNA, 1000 bp, Homo Sapiens
ggaattgaatcttgtcaattaccattttcccagcatcatgcctggtatgtggtaggcacttctcaaatgtttgttggatgaatagacaaaagatgagaggtgggcagtgggctgtgtggaggggatggctgggggtggaagtctacgggcagatcacacagggcttgtatgccatgttaaggagcttgggctatttctgggaggcaacggggagctaccgaaggatatgagctgcggggaaccacagtcagttttttatgtgagaaaggcctttctagcagcatcgtgatgaatgagttggatggagacacgagtgggaacagaaagaccaggaaggacctatatgaactgatgaactgggggaactgagggtgggtgagacctggggagcaacagatggcagggttcactttggtcaggggagggtgcctctgagcacaaggctattcccagtggtggggggaagtgggcagtgggctggctgccacttgtttttggagcctttgctacctctcctatgccctgcagaactgtcagtccctccagcgaatggcctgggccctctttcctcagtgccttccctgtgcccaggacaccagtctctgccctacctcagctaggcaggctgtgatctggtggagtctaggaggcaactcctccaaccccagtgtgatccagaaggagaggccagagtccctgtgaggtgagcttggcaagtttattgaaaacccaggaacacaaagagtagtgcacacaggcagcccaccccacccaacccccaggcctccttggagcttgcagacacaaccctgcagtggacagggctgggcctcacaccacgagcaggggcaggagtacggggatcattgcaaagcccgcctgtccgcctgcaccccacctcgtggacttgcatgctggagttacaccaacaacccaggaagagaaacagccggagagaagccactgggagaaaagccatctcggggtttagggagcctgg

SEQ ID NO: 483679 - DNA, 1000 bp, Homo Sapiens
catatgaatagttgggggactctgggaatatacaatctctcagagcaagtgaggagcccagctccacacccacaccacccttccatgctgaggcagcatctggagcccctgtcatccgagggcaaagcgcagagatgttcccacatactccacaccctctagctggctccgttccaagaggatctggcacacagtcaggacttaatttaacatctgctggcctgaagttaattggggaagacaatgaccgagaaattcattcaaaaaaaagcctttctatttcattcctgaaccacagggaaggggagaagcaatggaagtgaaaataatgtcaaacccagggtttacacagagaaagtaaattgttaactccaataagaaggaaacaggagagttagttctgggttctctgtaaggggaaattactaaactgacatttggtcatgcaagagaaaagatttccactccccaacccacactgcccccatcagaacaggtccgtccagagtcccaccccctctatgcaaaccgcacagattgggcactggagcaggcccccactgcagaggggcaacacagtgcaccactgctgatggccacaccccctgagccacaggaggcagtggagtccaggtccccgcagaccacaccaccctgggaatggctcacacatgtggacagagacacaggtcagaattctcttccatctcagacatgttatgacccagaatcctttagaaccaatgattaattatcttccttctctgagggaccagcaacatgagtctttttaaactacaggcaaacctgaacccactgccatctgcttcttcaggagtgtggttagcaaattgcacaccaaactctacttggaccaggctgatgttgagacatgttcatacaatctttgagcaaaaactgatagatcacactagaggagtcatctagaaatatggttgctagagaggtgaggggaatggagggatgggaatcagacacc

SEQ ID NO: 483680 - DNA, 1000 bp, Homo Sapiens; identical to SEQ ID NO: 309878

SEQ ID NO: 483681 - DNA, 1000 bp, Homo Sapiens; identical to SEQ ID NO: 309879

SEQ ID NO: 483682 - DNA, 1000 bp, Homo Sapiens; identical to SEQ ID NO: 309880

SEQ ID NO: 483683 - DNA, 1000 bp, Homo Sapiens; identical to SEQ ID NO: 309881

SEQ ID NO: 483684 - DNA, 1000 bp, Homo Sapiens; identical to SEQ ID NO: 309882

SEQ ID NO: 483685 - DNA, 1000 bp, Homo Sapiens; identical to SEQ ID NO: 309884

SEQ ID NO: 483686 - DNA, 1000 bp, Homo Sapiens; identical to SEQ ID NO: 309888

SEQ ID NO: 483687 - DNA, 1000 bp, Homo Sapiens; identical to SEQ ID NO: 309889

SEQ ID NO: 483688 - DNA, 331 bp, Homo Sapiens
ttaaacaaattaaaagaggagacccttgataaattgtatgttttttcttccttcctacaaaagacgatcctgttcccagtgaactctttcttgaactgaatgaagaccattcttccttgcttacccggaggagctcctccggcaggtctcccccatcattgatgcctcggttcatggcaatgaacctctccacagtgggcttatctttgacattggggttgtgcagactggtgttcaacatgatgatggcaaaggagaggacgtaacaagtatctaaagatgagagaaagcaagggagccgttgcatgctcagatgtcagaactcacgagg

SEQ ID NO: 483689 - DNA, 1000 bp, Homo Sapiens
ggtcattcaggttttatttatgacaacttcttagaacacacacatccaatctaggaacagaaatgtacaacatggggcttaaataactttcatacactatgtacagccatcggcagaggtacaaaacatatatacaccttgtgctagtcacatcatggaggacagcaggagcctaatgaagcctgcagcctgggcaggacatgattgctagaaaagagttggtgggcagggcagggccctgattcatctcaggggtcttctctgatcctcggctctttgtggaggagtttctatttcctacttccctgcaaggccctcaggacatggttcacaggactgaactagagtgtgataggggcttcaagatcatgagtgctggggatggggcaggggacagaacaaaggtatcaaagaagaaacagaactttccctgcaaaatctgtccttgcacacaagagggcagggaaggatctgggagtcaggagaggagggccaggcccaggaaggcctgtggggcattggccactgaccaggaggctatgccaagcaaggagagcagcaagcagttgcctgtttgggatggcaaagggacacataccacaggtccgggacacacagtgggaagaaagtcactgctcctgcagggcaggctctgcccacacaaacacgatggtgaacagaccaggcacaggcaacaaccaggggatatgcctgctcccagcccagaccacatcgggggatgccccccagagctgagagctagcagggcaaagaagtgttatgttccctaacgtcactgcagccacctgctggtgtctccctccaccacatcaggcacatgagaaagtccccgcaaccttgtgttttccccatgtggttttgtgctttaaactgccctctgcccaggccacacatccccagacaggcagcagggctggacagctgagggtgaagagattcctaggctgaatccagggtgaggccactcccagacccaccg

SEQ ID NO: 483690 - DNA, 1000 bp, Homo Sapiens
agagcctgcagtattgtaatttattgtaaaaccatgtaaccaaatacttaaatatatccacaacatctataccacagaaatgcatagtacataatatactaacatctcaaaataaacttctattacagttttatgcaaattatggtaaaagattatcacctgccacattttgaaatggcaccaacttcaacatcaatgcactagtcaaaatccttactagaagtgatgtcttctgcattatcatctgaacattcaaaatcaagctgttaatctaataaccacagtatgttatcatttaaaatcactgtatatttggatgttaaagcaggtagtaatacagcaggaaaagtgtttctaattcacagtttcaaaactaaagggtgcagttttcaaatatctgattgcttaaattggtcactcaatttaacaactgcctccttcaatacatgtaaactatgtttgcacagcattaggagatgtcttttatttcagaattagttcttactgttacaggagcaccacaaattttaaggaagaggctacagtgtgaaatgagctcactgaaggatatgttaaataaaattttaactacaatataaggtactgcaaaagctttgttccccagcacagatcccttaatcaggaaaagtagtgaacacttacccaatacaatatgtaaattcgctctacaggagatggggaaaaacctaactcaactaaaagaaaatactattattagctaacaaacctgtgatagctggcttcagaattttcctaaaaataaaattcaaaagcatacacagtatttatatcctttgataaggaatgtagacatccaaacggaatgaaagaaaaatctggttttaagaatttctaagtggaatcacacacacacaaatgggtaactgagaaaaactaaatattcaaaatttaagtaagaagatttataacagaaaaaagtggcaaattgttactgtgacttgattttctgaaaacatct

SEQ ID NO: 483691 - DNA, 1000 bp, Homo Sapiens
gcatttttattattttttaataaactttattctatattacaaataagttttttttgttctgaactgcaaaataggaatgccttatatttacatacacaggtatacaattaattataacaaaggtacagaagcttgcctttaccaagttacaactgggctccaatttaaatagcataggtttcctttttaaaaactttttaatttttttttaatattttactaggatactcttctttaaaaatcaaaaccagaagaccctcttcttagagatctcatccacatacatttgaggctcattttaacactgttgtctaaagatatgctttgctttgttctaacaaagggtcaatgttcgaggtgggagctttagtttgaaacagaagtgggatggggctggaagggggtgactggaacagagataacctgccctacctccttcaacggcttctctatgtgactcaaagacccctgccagttccttaaaccacccttccatcctgtttctccccttctctagcatttgaagctcaactctgggtcctctggctgggccaaaacccctgcatcatccccacacgtcggctcgctgagccattgtctgttgtggtaccctggagttgctggttgctatggtaactcagcaggaccctgctggaagagatgggctggcccctacatgctaaagtggggaggagggcagtggcatccaatccttccttcccacctcagggcctggaggccttgttcctgctcaaagcagccaacacacgactaagcaaagaccgtatgtctcaaggacaccaggccaaggtagggagtggtgaggggagggctgtccattctaaaacacaaaatcgttggtttccgaatggaaacaagattctttgaggtaagctagcttttcattttaagaacagaaggtttaacaagtcaacaagctaactagaacgtcggggagggagaggaaaggaggacagacagatgagcacgtgtatcccat

SEQ ID NO: 483692 - DNA, 1000 bp, Homo Sapiens
gaaaatttagaggatatttatttctcaggaaggtgcacaacagctggcaggcactgctttccctgctctaggggattcctctctccttttccaagaaatcccctctcttcttagaagtgcccatgggaggctgggatgtgaaaagaaaccatacacaacactccagagccttaaaaaaataaagcaacaacctcctccacacgaatacacttacaaaataaatagacggataaaagagaggccacgtgcctcccatcccggctgtagggctgcttggggatagtggggctgggtggctcggtcccacttctcccagccaggatgatccaaaggctaaatggaatggaagggccctggcttcagagagaggatggggcaggacctctcctggtactcagcagggaagacactgggggcacgggtagggaacaaaggaacaaataaataaataaatagaacccaacagcactctcagaggcctaagggcttagggtgaggctcaggggggccctggggcctgtttccctgaaaataacagatccagtacaggcagaaagaacagaagggaaaacacaggccacacccacctggcctgcagagcccagccccagaaggaggcctcaaatcagctctacagggaggaggggtggggtggggatgctgagctccacactagctgctctgagcctgctctctggccctggaggtgcccgaaggctagggaccctcccatccctgtgttctctgcggccagcagagcctcctccctcactctccagccttcatcctcaccatctccaccagaggaaaccgtagctatctccgaggtgggctctttcctaggaaagttgaggcagagccctctcctcctattcttaatggtcttcctgacttggggcatcctgagggtcagctgggagaagtccttgtgtaactataaataatcaaaacaatccaaccccatgtccacctctgctccacttggccacaggtgcccgca

SEQ ID NO: 483693 - DNA, 1000 bp, Homo Sapiens
gaaggagcgcaaaatattttattcaacaatttgcaatgtaacaattctcatttaggaaaaatagccgctcccgcctggaggaagcttcttgaatcaaaagtcgtggcagtcgaccccagaacagcgggcagagccgaccggaagaggtcccaggattcacacgagctgaccgagggacagagagggctgccccgtcacagggactggcctttctccaagtgacaaggacaaatggatccagcgggacacgcctgtggaacattttggaaaacatcctgggtggtctgggctaaatgatcaagtgaaacagaaagccaggaaggatctgtgctaattccacattctacaatttctacacttaaatttaaaacaccaaacagtttgtattcctccagcagaacctacagaaattatctactgatttttattagtatttaaatcttttcttcagtctctttagacttgacaagaatacgaagagtttcagaacagtcagagaagccttaaagctttgcatcagtgagaggaggcccgtctctgagttgaacagggttgagtccaccaggagctactcaaagtctcagtgtggcaaaactcggggcagaaatactaagttccagagctgctgtcaagaaactgtgttaagatactctccccaagtgctaccaacctctgaaccaacgtcccccaggggagaaagtgggtcatgtggattgtaccacgaaaagtgctcacggaaagtgcagccttttagagaagtgcatccagcttccttaacagtgagtctaaccgtgctcctacacacgaaatgaagcccaaatcaaacatcacacggtcagttttcaacctggatgaccaccctgagccatcatgtcagacagccggctctctggggctccttcccagtgactgggccacacggtgggcagtccccagcgctttgggtacacaaaatcacccatggtcctcatcaggccacagaaagtaaagtgaggctgga

SEQ ID NO: 483694 - DNA, 1000 bp, Homo Sapiens
gtttttttattgaggtcagcttctgttaacaatggacattaggcaatagatcataatatttctgtaacatgctgtgacagaaacttgaataattcacatgctgtactatgcttcagaatttgactacatatattgatgttttaaaaatatttcttgcaggagggaatgaataaaatcaggataaccctgtccccatttctttttgaacatatattgatattttaattgatacatagtaattacacataattatggcacagtatgacatttcaattatgtataatgcactactgatcaaatgaaggtaactggtatgtcacatcagatctaactatttcctttcttgctagaacatggctttttgatatagtcaattaattgttaactctagtttcctgtagaacattagatgttatttcttcatccaaatgcaccctctggtagctttagcctatcttttctccatctgtctcaatttttgagggtagagggcttaaacttctattatgaatgggacccaagaagaacagcatcacacactatgttgaaaagcttgtctttctcttgtaggcaatctcagtaggtcctttataatctggagaactgaatcaggtctggactgatctcagcaactgaccggcagcctgaaagggccatacaagtgtggagttcttcttttagaatatctaaaacttccttaacaccatcttcacccttgcaggcaaggccccaaatgattggtctcccaagaaaaatgcacctagctccaagggctagtgccttcaacacatcattgccggttcgaaccccaccatccatgtacacttcaattttcccattgacggcagccaccacttctctcagagcatcaatagatgcaggaacctcatcaagctgcctcccgccatggttggaaacaatgatgcctcggatgttgtgcttcactgctaattctgcatcctcttttgtcaaaatccctttgaggataatgggcaaccga

SEQ ID NO: 483695 - DNA, 1000 bp, Homo Sapiens
gcatgcaagtccgaaggtgccttcgctcgccgaaaagagactcagacacggaatcgtagctcagttttattttctacagaaacaaacatgtaagccgtcctcctccagcgacaaacaatcaggcccccacaatgaactggccactcgtgctgggaccattccctaggggaggaggcatgacctaggaaggggcgccaggctgggcttagcgcctctgccctgagggaggctgagccaaaaacacgggcagaaagcactgcgtgatccacatcaacagggaaagctgctggagacaggagctgatggagagctgcagttggcggtggtctgcagcagtcagtcggctaaatgtgaggggcagagaacatcacgttaaaggcgacacctctgcacccatctccctgggctccctcgggtggcggcgggcctggtgtaccaggtctctgttctgagaccctgtgctggggtgttcccaggtttctagcagcctgaccgtggggtgtaggcggatcccagcccccaccctgccacgctgtgaccgccacccacccaggccccatccctgtcctggtcctgaactgacatagtcagtatgttgccggacacagtgaactccttcagaagcacccctggcacgggaagcggtggggcatcctgggccaggctcctgcgggccagctctgcttccatgggtgtcgcgaaaggcatggcgaggtagctggtgggggcccagttaaggcatcctctcctaggacttggcctgtggctccggcctgctgcttaccccaggccagcttccccctcccccactcccccacccctcccccctaccccggattgcccagcccatcccccccaggctgtctccccaggcactggcccagtagcacaccccacccagctgtcttggttccccacttttcctttgctgcaccccaagctgactcctccatgcccttacaagacccctccccaccctgccccctgtggcatcacccgg

SEQ ID NO: 483696 - DNA, 1000 bp, Homo Sapiens
agaaatattatttttttaatacacagaatgtaagatggaattttatcaaataaaactatgaaaatgcaagtgggctcctatgccagaaaaacccacctggcgttccagatgcaagagggccagagcagaggcctggttctggggaagcctcaggatgctgcccaccaaggagtgatttccaaagagtaatccagggtgcccttttcccttctggggaagtgtggagaggtagagccccagaggagaatgtaaacaagcagccagcacctctgtataggcccggcctggatcagagagaggggagaactctgcagggtgtgggattgggctcagggacctccgagtgaggcagggactccctgctggctgctctgcagcagctgctggaacagggagtggggctggttgcgcagggtggccggggagtccagctctaccactctccccgcttgtagcaccagcacccggtctgagttcaggatcgtgttgagcctatgggcaatggtcagcactgtcttgttggcaaagcgtttgcagatggtctgctggagcagctggtctgtcttctggtccacacttgctgtggcctcatcgatacacaggatcttggcatctgtgaggagagccctggccaaacacaacagctgcctctgcccaagagataagctccggcccccctcacccagctcaccatccagaccacccatggatgtaatcacctcactcaggtggcactgcttcagggcctgccacaaggccctgtccttatgtaggccctgggggtccaggttttcccgaacagtcccactgaacaaaaagggctcctgggggatgatagccaactgggatctgagctgggccagctccagctggctggtgtccacgccgtccagcagcactcgccctgaactgggctctagcagccggaagagcaccaacaacagggaagacttgccggagcctgtgcggcccacgatgcccaacttctctccaggctgca

SEQ ID NO: 483697 - DNA, 526 bp, Homo Sapiens
ttgggaaattacttttctgggtttacctttctctgacatgagtaccacaaaacctgtcatcagtaaagattagacaataagctaaatccctgggagcagctagaccacgaagtacttcaaagatttgtacagagaatgtaagacttactgttcagagtcatagtagtccatacgcttctttttcttgttgtaagctgcaactcgaaagggaactatttccaaagtgattaaaccaggggccatcgtcagcactttggcaccatgacttggctcataaagatccttccctgtttctggatgaggcatgccagcagggtctcgtccaacaatgtaaaagttggctcctgcaaccatccgtgctctgcaatgccactggacctagaataaaagtttcattttaggtaactttgcttttatgactatgtacttagaaatagtaagtggataataaatgcatatgctttttataaaatcattatcggtaggaaatctcaacaaatttagatgtatcatcctgggaagccag

SEQ ID NO: 483698 - DNA, 1000 bp, Homo Sapiens; identical to SEQ ID NO: 309895

SEQ ID NO: 483699 - DNA, 1000 bp, Homo Sapiens; identical to SEQ ID NO: 309896

SEQ ID NO: 483700 - DNA, 1000 bp, Homo Sapiens
gtaattcattgtttcaattgtccaaaaattaaaaatcatacaatcctgtcaatagatgtgttaaaaaggcattgatctaaatgtgatatttaaaatgaggaaacttctaaatgtaaaattttttcatgacctttgtgttaaataaagatttcttcaatatgacaccaaaacatggtccattaaagaaaaaactattatattgtacttcataaaatgtaaaatctcttcaaaagacactaagataataagaaggtgtcatagatatctgtcatccaggttggagtgcagtggtgcggtcttggctcactgcaacctccacctcctgggttcaagagattctcctgtctcagtctcccgagtagctgggactacaggcatgcgccaccgcgcctggctaatttttgtattttttcttgagatggggttttgccatgttggtcaggttggtctcgaactcctgacctcaggtgatccacccatctcggcctcccaaagtgctgggattgtaggcgtaagctaccgtacctggccaaattcttatatattctcccttgtatacaaatatattaatgttaaatatagtcataagaattctgcatgctcagaaacattctgatcttatgatttttatgccctcaagtctcccctctccctgctacttgatctttatttccagaagtgggaattaggaacagaaacgaacacaacagtcctcaacacaaaagcttctttcttatgaagacaagacaaagccagtcaactaaaactaaataaataaaagaaaaaactaattcaacaacttggtcattgacaaattcatcatttggcaattgttctggagcaggcacatggacagttttttaagtatattaaaggaaaggaggaatggggtgggaggaaaaggaaaggaatgaaggaaggaaaaggaaggaaagcacgaggtctcagccatttgacgaatatccatcaagtgcaaatccataccctcaaaatgtggcaa

SEQ ID NO: 483701 - DNA, 1000 bp, Homo Sapiens; identical to SEQ ID NO: 309898

SEQ ID NO: 483702 - DNA, 1000 bp, Homo Sapiens; identical to SEQ ID NO: 309899

SEQ ID NO: 483703 - DNA, 1000 bp, Homo Sapiens; identical to SEQ ID NO: 309901

SEQ ID NO: 483704 - DNA, 1000 bp, Homo Sapiens
ccatcgccccgcgcccgcgcgggaccgcgggcagccgcctctcgaccgccgcgcggggaacgcgaactcttggggaatggagcactgagtgtgagtcgtgagacaaaacgagggcagacgcagcagaggggccgctccgcgccacagctcccgccgggacagcagcctctgcctagcagcttctggcgggctcgggacgcatgtggaagctcccggcgcctagccccgcccctatttccctctggccccgcccaatcctcgccttgttccttttggcccagtccggtctattcatagccccgcctccgatccccaccaaccctttccccaccccgccccgcctctggtccaaccctgtctgctcctagctcctctttttccacgcctggcccagccccatcgccctggcccccgcctccaggccttcctttgggcaggtgcgaccctggagcagagttccaggaaggcaaagacttgaggctggcatcgcaggcgcgtccttctctaaccaccggatgtccttggcctagtcactgcacaccttaagataacagctattcattgatgtctgctctgtgctcagcaccaaaaggggaagcagagggacagattgctcccagctgatagaaaatgtaaataaagtaattccgagttgtgatcagaaagaaacaagctggaggctggggcagaatcacagtggtgggggacttgctccaggctgcagcgctctccatgggccccgctgcccactcaagtctttctcaccaggaagtaccagtcgcagcttgactgcctcctggggctgtcgtgtcagccaaggggtccccaccaggagacctgtgttgtggaccagcgagacaaccctgggcaagtcactttcctctctgggcctgtttcctcgtctggaagcgaggaaccgaggcagataaactagaggactcgggaaggtacagctctgacactcactcaagccatccccggaaatgatatgcagtcgcct

SEQ ID NO: 483705 - DNA, 1000 bp, Homo Sapiens; identical to SEQ ID NO: 309903

SEQ ID NO: 483706 - DNA, 1000 bp, Homo Sapiens
gttaagacaattgtccattttatttgttaaattgctaaaaagtcatcaggggaaaacattaacaaaaaatgaaattgacagatttaaatatcaatgaaatccatgtttcattcctacactgttatgtgcccaaaatgactatctcagggtaagccacctggcatccctgagttgtatgggaaacatcactcacagcaccagcttcgccagggcacatggggtgtgcactgacatgaaccctggttggagggaggggagcagagcaagtagagtgtacaatggagccaacacctaaagtttgctctcatttgacaatgaacacggtgagagggagccacttactggtaaccatgcagaacatgccttctgcagttcatggagaggctacatgggacgcaggcctggaaattcagcttcctcaccaccaggcgtggttagatcctccccactgacttgtgcgctggtaagagaccatggataatgcaaagtggagcatatcaccatgccaggatcaccacaaggacaaggacagacagacagaccaaccaggaataccacttttaagggggaaggaaagagtgaagcagaaggaaacccagaatgacaaggtgaaagaaaggaaagggaaacatctctttgttctccattggctggtggctttctgtcctccaaagtcaaggcttcttaagttggttttctttcttcctcctcctcctcctcttttctttattttaaagagttccaacacagttcctagaatagttcatggttttcagctgttgctgtaaaactcgaacattaaaatcaaatcaatccacagacagctgggaggagagtaagcccagtatgccctaaaatgaaatttaagcttgtttcaacaccaaatttgtgctcccaaagtgtagggtagggtgaggttgtggagtccaccaaccaaatgaagggtggaaataggaatgaaaacacaaaacccgctctgctgtataacctgtgaaataag

SEQ ID NO: 483707 - DNA, 1000 bp, Homo Sapiens; identical to SEQ ID NO: 309904

SEQ ID NO: 483708 - DNA, 1000 bp, Homo Sapiens
ccttccttccttccttccttcctttctttctttctttctttttatttagacacttgctctgttgcccaggctggagtgcagtggtgtgatcttggctcactgcaacctccgcctcccaggctcaagtaattctcctgcctcagcctcccaagtagctgggactacaggtgtgtgccaccacacccagctaatttttgtattcttaatagagaaggggcttcatcgtggtcttcgctgaggttgtgatcttggctaaggtgctgttcgtccctcggctgctgttggttgtagtcggagggacagaaggaagagggtccctgctggtggggaagggccccttggttgcgatgtccatggtcggtgtctctgaaggggtgaagttcttgagggcggcttccgaggggctgtaggaggaagcagagctcccagcaaaggaagttgttttgcccactgctgacccagcctctatggagaccggagctgctcctgagactttgacgtaacttggtgtctcaacagagagggctgaggtttcttcaaggggattcctgctaactgtgaccagagctccactgagggtcgtggccccgggtgctgtcacttctctttctgtggcgctgttagtggggagtggggtcccaaccgtggcatcaggtgcagctgactctgtggtgccggctgtggacagggtctcggcagaggctgtgacctcagtgatgtgtggttttgcttcagtggagtcaggcagagctggtggatcggaggtggacgaggccttcaccccttccgtggggatgagatctgtgtctgaggccccagggatgctggaagtcgttgtttctatttctgtgatgctgcaattaataacctcgatgtttgtgacagtcaccagggcttcagcgaggagagtgacgtcagatcccggggaccatgagggggtgatgactggatgggggccgtcggaagaggcgctgctctctgaggcccgtgacggggtgat

SEQ ID NO: 483709 - DNA, 1000 bp, Homo Sapiens
atggaaagttttatcaaagctaaaatttatttggtgcatactcctcttgatatcaggtatgttcgcatatacctttttctttcatgtgtaaaaacaaccatgtgaggtattttacaggtcaaaagaaaacaaaaactacttccttattcagtgtaaaggaggcttataagcattccaaaataaaaacaaacaaaaaccagacaagtacatagtctatttccatttccttttatacatcctctctatatatcacacatttagcaataggagaatagagaactaattcaaatgcaagggaatcttttttgtagattctgttgacagatgctctttaacctaaacattttctactctaaacataacggacttaattgtcttcagtacgtgaaataattttaaggtgatctagtactttgaaaatttcattcacttaagaacacttaagctgaaaaatagcactatttttcagaggcaatttctcaacagaaaaaggcaatggtaacagttcaattgatggaaatggttgaaataaaatacctgaagtagaaaaaaggtgtaggaacaattttgtaaaaacatagcaccattacctcaacgaatgaacaaattttacatactgtatttttttcaaatgacttattttcatatttagtagttcaagttctataagctgttatattaagctttctttctgtttaagagttcaacactaacatcatgttattttacaaaataaaaaacaatttctcaataaacagtgactactaaattgttacaaagaaaaattcttcaatacttattttattccatatgtaggctttttcccaaaagacatattaatattgcattacaaacaggacagctaatctggtcaagttgtgaatatatttgacaaaaacatttgatcttcctactgtttttcatttattggatgcatttctttagcaattctgttagtcctttttctaaaatcaagttaaccaagtacagcccatacaga

SEQ ID NO: 483710 - DNA, 1000 bp, Homo Sapiens
gagacggagtctcaccatctcccaggctggagtgtactggtgtgatctcagatcactgcaacctccgcctcccaggttcaagtgattctcctgtgtgagccaccgtgcctggcctttattttattttttgattttaattttaattttttttgagatggagtctcattctgtcacacaggctggagtgcagtggtgcagtggcatgatctcggctcgctgcaacctccgcctcccaggttcaagcaattctcatgccttaccctcccaagtagctgggattacaggtgtgcaccaccatgcccagctaatttttgtatttttagtagagacagggtttcattatgttggccaggctggtcttgaactcctgaccttaagtgatgtgcccaccttggcctcccaaagtgctgggattacaggcatgagccactgcgcccagcatgaatgctagttttaaaatctttttttaacttcaatctgagtaagatgaggcatgtattgcattgcatagatgctgactgatttcatgttttctgtgctgccctcctgtcatacctgccataaatgccaggggttagccttcctggaatgtccttgctacattacatgaacttgctgccccactgcctctcacaatttataaattacagtggagaaaatggtgctgacccacactcagcccaaggtcaagccagtagctctgctcaagggtttataaatgtgttttgacacacagcatctctcaccctcactgcagggtcagtggagagagagagtgggctccccctcatctgggcacagtggggagagtggggcctccatgggtgctctggatagggaagcagagttctggatgaggatgcaccatcagtgacagctttggaactgcagacaccaaggcagaggctgcccccggcatgcacggaggagcggtctgtgaggcagcccaagaatgaatctaggcagagggtgtctgacatgagggctgaggtggcgggtg

SEQ ID NO: 483711 - DNA, 1000 bp, Homo Sapiens
aagtgacactcattttaatagaccctacaaaaatacaatattttcaatgtccccataaaacagttaacttacaaatattattctcagagctctggtgacatcattcagtgatactattgtgaaaatcctcatacaatacttgaaacactagcatgtaaagtaaattcattatataacaaaagaactatgtaaaattatgaaagataatgcatgcaaccaactccgggaaattatcctggaaattcaaattaatattgtaattaaattaatgactaatatgaaagataagtattttaaaggattataaaataaattttgatcatttatgcaggaaaatagtttcaatggaaaagtaaataattctacattaaccatgcttgtctttctcttcagtgaaaaagcattcaggattttacataccttgaaactgtttttggaaaaaaagtattttatctatttctgcccagaaaaacagccattgaaattaatgatacaggtagaccacagctctgagaaattatatttgaagtttcatatttaaataccaaggatttaaaatcacctaccataactttctaacagcagtctttcgtaatgataaattttatcaatttccaaaattcgttttaaataatttaaaaagcagcaaattagattaagcaacacacaaataaattccacatttacaagtaaagaaatcacaggggctacagtttataatcaacatgaacttgaaagaaataaagcaatacctttcctgccacccatcatccactgcttaaatttgtggtgaaaaagacttaactacaatgacctttagtctgtttctaaactctgcatgtattgtaattagctaaaggcattgaacaaattagttcatcctatttttatttgggtcccagagataaatggctaatttatgaaatatttcactctgtgtcatgagaatttagcaaatgaatatggaaccaaatataaacactttataccatatgtacag

SEQ ID NO: 483712 - DNA, 1000 bp, Homo Sapiens
agaacacagactttttattttttgcatttattgtggtaaaatatacataacataaaaccttttaaccatttatttttaaacattttaagcttcttattgaaatataacaatataggaaacacatacacagtacaacttgtaagtacactgctcaatcagatttcatctggatcaagaacagaatattccaatattccggaaaagaaaagaaacatgttaaaaagaaaagatttttatttaaaaaacctagacatagtaattaaaatgggggttaagagaggtaatctctctatccctttgtgtgtgtgtgtatatatatatatatcatacataatcccatatctatgcatctatacccaccctataatgtaccattttcagaaatgggtttgcagaagactttctaaggggtatttgttttattgtttaaaagattatgtggtaataactttgggatacactaaatagagtaatcaaacaagtttgtcacccaaggaaattttcacaaattcagacttcagggcctattgactgatcattctcaagtcaagagaggaatgaggagaatccttcttgcccattctagatatattttttaaattatgataaaatatacataacaaaatttaccattttaaccatttttatgggtacaatttagtggcattaacattcaaaatgttgagcaaccatcatcgctatccatttccagaatttgttcatcccaaacagaaactatgtactcgttaaacaataaccccaccccccatttcctcctccctgcagtccctggcaaccactattctcctttctgtttctgtgaacttgcctatgctggtacctcataaaagtggcatcatatttggccttttgtgtctggcttatttcacttagcatagtgttttcaaggtttatcctgaggtagtatttatcagaatttcattcctttttaaagctaaataatattccattgtatgtattatagcacatttgtttatcc

SEQ ID NO: 483713 - DNA, 1000 bp, Homo Sapiens; identical to SEQ ID NO: 309905

SEQ ID NO: 483714 - DNA, 1000 bp, Homo Sapiens
cagaagcaaggacatgtttattcagatccatggtcgttacaagcttcatttttggtcacaggccctaaaatgccattatgctcagtttacatcaaaatacaaagcccaacatttacaatttcaaaaacattaaagcaaacccccaaaaccccacaccgaaaacaaaggcttggtttggaaatcaccactgagatgctgttctccctcgcatgtcgcctgtggggtgaatgaaggtgaagaccccgtgctggtttctgtcagagaatctgtagttgtatattttgaatacttaagtaccactgaacggttgccatgtctttgagcacttgatgttactgaagtgacaatgcttctgaccatctttggctgcagagcagaaactggcagaatccgaccccatcgacccagcagtgtccccaacgcctgaggaccagcacccatctgtgacaaggcacaggggtccgcgatgttggccactgctttgggtgatgtgctcaatggcttggggtctgcggtgaagcccctgggctctgggagggtcttaggctcctgaaacatggaattctacggcccagtcttggaacagctgggagaacatgaagaacgcccctcacagtgaagaatcaggacagccactctctggttttctcacaactctagaaactttgattctttcctggagtggagacttaagccactgtcctggtcccacacagagagaggaagcgccacaacccactctgccaacctcaaggccagccagtggggaggccaggcccaggtggctgttggcaggctggctcccaagcttggtgcagcagagtagccaaatgggcagtggaaaaaaggccccgagagctggcttggccgtgagtccttggcggagggagggaaaggccgccgctgagctctgcgctgtcacagagcgtagctgttgagccctggcagctactcctttgctggggcccacctgccttcctttcttggttgcgtttcctcc

SEQ ID NO: 483715 - DNA, 1000 bp, Homo Sapiens; identical to SEQ ID NO: 309906

SEQ ID NO: 483716 - DNA, 1000 bp, Homo Sapiens; identical to SEQ ID NO: 309908

SEQ ID NO: 483717 - DNA, 1000 bp, Homo Sapiens; identical to SEQ ID NO: 309909

SEQ ID NO: 483718 - DNA, 1000 bp, Homo Sapiens
gatcccttgagcccagtaggtcaagggtgtagtgagcagtgatcaccacactgtacttcagcctgggtgacagagcgagaacctgtctcaaaaaaagaaaagaaaaaatatggctgggagagaaggggatgtgtccagtaaagaaagaagtgttgcctgtttcagtggggtgggtacctgtccaagaccttagaaattggacaaggcggccaggcgcggtggctcacgcctgtaatcccagcactttgggaggctaggcgggcggatcacccgagatcaggagtttgtgaccagcctggccaacatggcgaaaccccatctctactaaaaatacaaaaattagcggggcatggtggcgggtgcctgtaatcccagctactcgggtagctgaggcaggagaatcgtttgaacccaggaggcacaggtttcaatgagccaagattgcaccactgcactccagcctgggcgacaaaacaagcctatatctccaggggaaaaaaaaaaaaaaaaaaaaaaaagattcggacaaggctgaaaacctgtaaccgttccaaagcccgttccaaagtgaagaggtggggcctaagggtctgatagtggtggagaagggctgatttttccgctgggtatttgattggaggaagctcccggtgggggcggagccagtcccagctcctccctctctttctgcagctgggagttaacccctcaactaccgggacccaggagttgaagccggggttggagggctctctgggggtgggggacacactgtatttggtcaatggcctccacccactgaccctgcgctgggaagagacccgcacaccagaatcccagccagatactccgcctggcacccctctggtgtcccaagatgagaagagagatgctgagctgccgaagaagcgtatgcggaagtcaaaccccggctgggagaacttggagaagttgctagtgttcaccgcagctggggtgaaaccccagggcaaggtgaggg

SEQ ID NO: 483719 - DNA, 1000 bp, Homo Sapiens; identical to SEQ ID NO: 309910

SEQ ID NO: 483720 - DNA, 858 bp, Homo Sapiens
tttttttttttttatttcaaatacatctttattttggcagttgtgggggtggggtgggggcgggaatcaagagaaaactaggtttagatacttttattttctgatccggggtcttaggccaacttgtgactgagcaggctaatcaatctggaataaactagaaaacttcccatccatgagatattctctattcatctcaacccaaatcaataaactctggaacaaccacagactcttttctttatattcatcaagaaatggataatctgggtgatgagaaaagatagacatttacaaatggcgtatattcttgttcaagccatctgtggttttcatgtcctctggtgtcagctagaagtcaaaaacctggaagttttctttgattctcttctcactgaagctcttcaccaggaccaccaccccacgctgcagctggtagcacaaggcaacctgggctggagttcgcctgggcttttcagcaatggcattgagtattggatcctcctggagaactgggtttccttttttcacccagtctttgtctgagtcagaccccaaggcagaatatgcagtcatgacaatgtccttggacttacagtactccaggagtttgctttggttgaggtaagggtgatattccacctgtattcccagctatgtgggaggcagaggtacatgcttgaacctgggaggcggaggttgcagtgagccgagatcgtgccactgtactccagccttggcaacaggagtaaaactctcccatgtgctgcagagacccactgtgtcaaacatgatctttccctgtgcatccgtcagcaaaagctcctcccaggctgcaaaggtactgggaaatgaaaa

SEQ ID NO: 483721 - DNA, 1000 bp, Homo Sapiens; identical to SEQ ID NO: 309911

SEQ ID NO: 483722 - DNA, 1000 bp, Homo Sapiens
gagctcatgtttcatgtatactcaatggacatttataaccagggatctgtgcgttttgctataattcagaaagtagcagactactcgacacgtgtcatttggcaagggattttaagagcacatagtatacttagaataatcatgctttacatttaaataatgctttatagcttatcatcacatttctggtaagcattatctgaatttgaaatttgtgatcctttacctaccttgcagtctttgagtaaaagtgccttatggccgggcgcgatggctcatgcctgtaatcccagaactttgggaggctgaggcgggcggatcacgaggtcaggagtttgagaccagcctgaccaacatggtgaaaccccatctctactaacaatacaaaaattagccgggcatggtgcatgcacctgtaatcctagctactcaggaggctgaggcaggagaatcgcttgaacccaggaggcagaggttgtagtgagccaaaatcacaccatcgcactccagcctgggcgatagagcgagactccttctcaaaaaaaaaaaaaaaagtgtctgatatttaatctctgagcttttggtttatttgcctatgaaatggggccctatcacgtttttattgcccaggactgtttcaagagacaaatatgactagatgaaaggctttaaaaaatgtaaaatgtggccaggcacagtggctcatgcctgtaatcccagtactttgggaggctgggtagatcacttgaggtcaggagttcgagaccagcttgaacaacatggtgaaaccccatctctactaaaaatacaaacaattagccaggcatggtggcacacgcttgtaatcccagctactctggagactgaggcaggtgaattgcttgaatctgggaggcagaggttgcagtgagcagaaatcctgccattgcactccagcctgggtgacagagggagactttgtttcaaatcaaacaaacaaaaaatgtaatcagaatgtgtt

SEQ ID NO: 483723 - DNA, 1000 bp, Homo Sapiens
ttggggatgagcagtgggatcctgcccgaggtggtcaagttacaaccaattccagccaacaaagtgagttgacaaccagccccgggggcttgctcctctacccttccttggccacctacccccacaacccccaggagggactatactatcctgtttgaagacacctcctatgcaggcggctactcccctcatctcagtgtggcccagaggtacctggtagcttctaaggagcccaagaaaaagtgacgctgcccggcggactcgacgtcctccaccatcttggggcaggacagcagaggatgtgctgggattaaacagacatcccccctccacacatctcctgggttttacttctccaaacccttctcccctccccagatatggtgacctggggagctgaaggctgggggagaggtgaccatatgtggccccaccgggcattcactctttcagctcagagtttctcttcctttccaatacaggctctacatgaacacaaatcatattttattttaattgagctttattttctttggagggagggtcttgcttgtcatccaggctgtagtgaatgggcatgtcataactcactgtatccacaacctcctgggctgaaatgatcctccagcctctgcttcccaagtagctgggactacaggtaagtgccagcacatgtggctaatttttttacatctttgtagagatgaggtctcactattttaccaggctggtctcaaattcgtggcctattgtgatcctaccagctcaacctcccaaatcgctgggattgcagacatgagccactgtgcctgactcaaaaatcatactttattcttgagcccattggtcagggtagattcgcacactccctctgcagtgactccaggagcccctctcacagctcagagcggaagctgaggctgcagcctgccatcttctccgcatagtccgcatcgaagcgctcattctgcgccacggtgaaggtggtcttccagtcccc

SEQ ID NO: 483724 - DNA, 1000 bp, Homo Sapiens; identical to SEQ ID NO: 309915

SEQ ID NO: 483725 - DNA, 1000 bp, Homo Sapiens
ttttttttttttttttttttttttttttttttttttttttttttttttttttttttttttttttttttttttttttttttttttttttttttttttttttttttttttttttaaaaaagaatgacatagagcctttattaaactggttctgaggtatgtgggactagcctggctggctgaccaggcttcttgagccccacaggcctctttcacagaaagggagtttggatcaacaagaccatgtacaaaagggggataatatacctacgtgaggagccaagtttccatgttgatggtaaatggaaaaacttttgagtcagagctgagctctgggacaaaaagggaaaagaagagggatgaagggaaggggcccaattcctcttgactgattctaaagctcatagggggattccaactcacagctagccctctgtactaaggaaccagacgaatcttgacctcccagggaacctagacctgggaaggctgaacttgctatttgagggtcaagtctactccctgaaggtggagtgctggatattttgatggggacaaggagggacaatagatcaacctcagcaaaggctggtaagcctgggcaaggttccacagggatggatcttcctaaggggtgggggggcttcccagttcctagaaaatggcggtgcgcgcagactgcctccctcctcttcattgtagcttgatcctgcgcagtgaccgttcacggaaagagtcaggcctgggaggggccggaccggggcacaaatgctggaggtttcagagatgggctggcgctggcgaaggcaggtctgccagtgacgtatttgtcctgtgggtcctgggctctttcgtggcacgcagggcactctccttcctgggatgggagaatggaattcttcttccgtgagagagaaaatacggaggtgaagaagagcagaatgggcgagtaccagactgcagctgcagccaagccagggaagaggctaaagagggtcctcgg

SEQ ID NO: 483726 - DNA, 1000 bp, Homo Sapiens; identical to SEQ ID NO: 120144

SEQ ID NO: 483727 - DNA, 1000 bp, Homo Sapiens
caaggttctgtacgctccgtggctgctcaagctggcttgggccccgctggtggacgcgcagggctcggcgagggcctgggtgacgcgcagcacggcgggcctgggcctggtgtgtgggctgcttgccgggctgccccctcctggagctggccaggccgggctgcccgccgctgtggcggggttgctgctgttgttgaacctgggtgccgccatgcaggatgtggccctggacgcgctggctgtgcagctgctggagccggccgaactggggccgggcaataccgtgcaggtggtcgcgtacaagctgggggccgcgctagctgggggcgcgctgctggcgctgctgcccaccttctcgtggccgcaactctttctgctcctggctgccacctactggctggccgcggccctggcctgggctgcaccagccctgcggcggctcccacagcagcccccttccgagcagcgtccccacaccgcgcaccttctgcgggacgtgctagccgtgccggggaccgtgtggacggcaggctttgtgctcacctacaagctgggtgagtgaggcctcgagccaggcaacagcagttggggcttccgggacagctccaggtgtgtccccaggggcttgcaacccattacagggccacgctctttctggggtatgacctgcaagacttggccctgacatccggggctctgcagctgggccttgtgtcttgtccgcccccagctctagccccatccctgagcgctctctcgggctgccccacttctcccccagtatctgcagctctggaacactgaggagagcagggcaggactgagggcccaggtggggagaagggaggtgggggcagatatggaacctcccgtgctcatgccccccccaccacccaaggtgagcagggtgccagcagcctgtttcctcttctcctgctggaccacggcgtttctgctcccgagttgggactgtggaatggtgtgggtgctgtggtctgct

SEQ ID NO: 483728 - DNA, 1000 bp, Homo Sapiens
catggtaaagactgctttattggtggcagttactacaagtcaataaatattgatccccaaagaagagctcggttatttatcagattactggtccatagagagctgaatgaaactgaaccaagcgattgctgggatgactgaagtcactcctgcttcttgggaaatgaagccacagccagctcatatatggcatatgctgttcctaaaaataaaaaacaaaaaagaacttaaccataaattctaagatctaagtgtataaatttaatattccagttcaaaagtgtaagtttgcattaagactaccttaattggaacacaaaaaagtattttgataggtgctggaaaaattttaaataaatatatgtaaaatatatttaatctagttttaatatagaaagtgtggcacaataatatatttgtcaacataaaatgcaaaaatttttaaaaataagattaagaacgtatacaaaggttatttccatattaacccaagactgcctgagaaatgctaaggatgattaaatgccaaagaaaaaaatagttcaaaatatgcaagccttcccttaaaagtgaaatgtaaaaaaaaagagtgatataattttaaaggtaatcaaatgtaatataaaaaatagctgataactgggccgggcatagttgctgaaacctgtaatcccagcactttgggaggccgaggcgggcggatcacctgaggtcaggagttcaagaccagcctgaccaacacggagaaactccgtctctactaaaactacaaaattacccaggcatggtggtgcacgcctgtaatcccagctactcgggaggctgaggcaggagaatcgcttgaacccgggaggcagaggttgcagtgagccgagatcgcgccattgcaatccagcctgggcaacaggagcaaaactccatttcaaaaaaaaagaagacatcacaatgctcttatacagtatgtatcagtcaccctcttgaatcattatgagatatagta

SEQ ID NO: 483729 - DNA, 1000 bp, Homo Sapiens
tctgtataaaagggaaaagttaatttttaatacaaatacaaaatttatttccatagaaagcaaaatttataagttaaatataaagattaaaatagtgtttgaaaagctcactatagtgctaacaaactaaatgaaaataaggctattttgcatttaaaactgaaatacctcttaaaataatttgatccccagtgtttgctctttttgaagtaaccaacttactcttaaaaaggatggctgccaagatggaaagtcttactgggttttcatgttaacctattctttggacataactatgaattttgtatacaatgcacttcatgaaaagttgtggctcccccagattgcccacaagtgtgatcttgaagtcctaaacatttgtccatgtaagcttcaaaacagcgttaactgagttattcaagtagcagtacttaaagatacaattcttgaagcagtttcaatggtttctgatccaaataatcagtttctgaacattactacttcacataatagagtccatcttcagtttcttctcactttctctttcccttttgggtttcctttttgtggcctgaggccaccagttctttgggtactatcaagatacttccatcatgggtacactggagagcatagtggttgggattgactggcctaccttggtcatctcttaatctactaaaaatatcatgataaaggtcatgcagtttctgtttcattatgttaatagctttgttacattgtgcttgctctctcttaagagtttccttctttgcttgcaagttacatacatcatcttctaaattcaaaattatgtccaatttgcgtttacgacagttctgcgcagcaactttatttttccctcttcgtctgatgtcacggataagtgagacttgtaggtctgtcagataatatctacttaacatgctattgaaagaatcaacaggcatgccgacaatttcatctacagaaaaagggatatgcaaagctttagcacgct

SEQ ID NO: 483730 - DNA, 1000 bp, Homo Sapiens; identical to SEQ ID NO: 309918

SEQ ID NO: 483731 - DNA, 1000 bp, Homo Sapiens
gtgtttgcctttcccttttatttatttagttagttatcatcattattgttttagtttctaaagtttctagctaaaaacgagctgaaagggttctttgtgaaaaaaaaaatcattacagttttccatatcctacttttctagatagttcaaaaattccctttcatcacagaaattcttccgcaaacagtaaacacataaagatcttttagacattcgttcctcttgctttcttccttcaaatcatcgtatttccgatcgcatttaaaatattacgaacattctaatatgacaagtcaaactgaaatataacagattgtaaaaaaaaaaagtgttttctttgtaatatggcatttattttacaatgcacatattaggtcaaatggtaagaaccaaagcatctcccccccccccccttggagatcgcacagagtgggcgcctttgaaggctaccctgactgccgcaaggagatttgtccacaagatttgagctttcatataccttccataccaaaggacatacctaccactacagtttgtggcggcttaaaaagaaaaattgaagcatatcattaagaaaaatctgcaagatgtgtctgaggagtactgcagttgtgaaggcgaggggagcagggccttccccaggctggctgggcagtggctggcctcatccttggaggcagtctccgttctggaaagcagctggctcacactttttttgggtttgttctcttttgggcactcctagctttaatggtcttcttggggctggctggtttgggagcaggaggctttccctttggtttcggggtgttgctacgactggtgcgcccggctgttcgcttcttgtcctgaacggtcctccgctgttcccgcagcctctcttcccactgtatggatcttttactaagttgatctctccatttttcaactaaacagttttcaagaagcatcatcctggagcgccactcgtaacacatgatgagaacgtcttgatgcggca

SEQ ID NO: 483732 - DNA, 1000 bp, Homo Sapiens
tctttacaattttatttacaaaatgtattaaaactttgtacaatacctcatggcaatgaggctctgtagtttatgcccacacatgcaaattacgcttttatagccattagtttgcttggcaatttttctgttcactgaagtacagctttaacaacaaaaagaaaagaattggaaaaaaaatcctcaagtgactactgccaaactcccatagcttgaagttagtagcagaaatttgaagcaatcaacttttttttaaacatgcaagttttttttaaaaaataacaaaccaatttacccgcctcttcatctcagtgacgtttcctctctggaaaaactgatttgagttaataaacatacatttttctttatacagtgcctatggaaaacatttgtgtgtaggttggttggtttgttttatacaacttcatgttcacacagcgtgagcttacccgcgctgggacattatagcattcataagttgaaaatcacagtttcatgaaaacaaaacaaaacaaaaacacaacagctttctttttttgttcaataccatttgaaatttgacaagtgagttgtttgcttatgacaccatttttggaatgaaagtttatagtacacttttctggaaacatttcgttggaacgatacttcttcctttcttttctgaagacaagagcaaatatgcagcgagtcaactaagcatctaagggtcacacttgggaaatgaatgcgagctcctagtttttgcagtctggaaacttcccaatgcacgttatcgatgagagcaaactactgaactacaggaagcatacgtcgttatataggaggtaattagtgagtggagactatttcttcggactgttctgatgatgccaacggcaggtatgcagttagttacttgatagcccatggagcagtggagcgatctgagagagtcaatagagagactgctccaagcaaggatctggaagtgatgctgaggccctcagattagcagtaggtt

SEQ ID NO: 483733 - DNA, 1000 bp, Homo Sapiens; identical to SEQ ID NO: 309920

SEQ ID NO: 483734 - DNA, 1000 bp, Homo Sapiens; identical to SEQ ID NO: 309921

SEQ ID NO: 483735 - DNA, 696 bp, Homo Sapiens
gcttttttttgagacggagtctcgctctgtcgcccaggctagagtgccagtggtgcgatctcggctcactgcaagctccacctcccgggttcacgcacattctcctgcctcagcctcccaagtagctgggactacaggcgcccaccaccacacttggctaattttttttttgtatttttagtagagacggggtttcaccatgttagccaggatgctctcaatctcctgacctcatgatccgcccacctcggcctcccaaagtgctgggattacagacgtgagccacagcacctagccgcaaatgtggcttcttttaaccagggcctctggggtacttggttctaaggcatgggataggaggaatgtaatgagggtgagaagctatcctccttaaaaggttaggtagctaacctgggtatctgaaagtgccggtaaagaacaccgtcataatttccattagtgctgtagtggggagaagacacaatttcgatgtgtaactctctggcaaatggaggcccaggcagcaatgagcagcttcctttgtcttcaggggcgatggagccttccaagtacctctattagagaaataaccaccacgttataaccttctcctaagggggcaggctctaacctgtctctcagcagccaacatgtctatttccatcctgtctttcccataaccacaaggcttgtgga

SEQ ID NO: 483736 - DNA, 1000 bp, Homo Sapiens
ccctccggcctcccgcggacccgaccctgccacagccggggaagtgggggctccacgagaggctccggctgggctcttaccttggccactggccggcgctaggcaggcgacgagagccaggagcagcgtgcacgccactgctgccggcccgcgatccatctccgcgacggtccccggcctcgccgttccttccccgggaggtgggcgcgcgtagcacaccgcaccggcagcgcctctgctagcgaacgctcctttaggtctgcacctccgccagctcctagtggccaaaagcctgcccccacgcccgaggcatcccgttttctacccgcgccagtccccaccctccagacagtgcataaagccctttagacccgaccgccccggaacaagcatgcgggaatccagcgggcaggccccctgccgcccggcccgccccctgactttgcagcgcggggaggagtgggcactcgaacacacgcgtgctcacacaggggacactcacacaggcgtgtgcacactcacacacgcactcattcaggcgcatgcactcctaagtgtcacaccaactgacacagattcactcatacacgcagtcacacacgcgcgcacattccacagtcacacttcaacggcgacattcacagtcccctttacgcgtgcatacaagagcacactcctgtgcgcacactctcacaggcacactcacacgtgcacacgcgctgccctcgcctctccgcagggtttgccccgcacagaagccggcgaggcggctcacggggaaatctgcacggacgcagttttactaaatgagcaatggaaagaaatggacgaggaggaaagtcaagaatagagaagagaaagaaaaaataagaaatggaaaaggaaagcacaaccagacaagtaaaaatgaaggaaagagaaagaaagggaaagaggcgggggtagggaagggaaggagtaaagagcctgctggatggagatctgtgaccttcattcctgg

SEQ ID NO: 483737 - DNA, 1000 bp, Homo Sapiens; identical to SEQ ID NO: 309923

SEQ ID NO: 483738 - DNA, 1000 bp, Homo Sapiens
atcatgccatttatacatacataaaaactttcctagtacagattatagagaatattacaaagctggcagattcatttgggattctgttcaggaaaataggaattaaaatgaatttgtaaaaggtagcgtcacatagagagggtagtgtggcatggatcccatacacttacttaagtcacagaaacatcttttcctttagcatatgaattcttttgcaaaatgtagttgaattcttaccccagtgttccccggcctgacatgggaggacttggcggtttctgagtaggaggatttgttctcgacagtgtgccagttcttgcaggctggttatttccatgctaaaatgtagaaagaaatgcttttatttttatatcaaattgttctcctggtgttttaacaccatgtattattttttttaaatatcagaatgtgaattaaggattcccagacagtttgaataaagactttggtactacagtttaaaaagtcaaggaaccacttgcacttggtcttcctattattttatgccatttatatcacattgtagccaaatacaggtgagatgactggatttaatatcttattttattgttaaacatgttcactgagatcaaacttatctgcattcaaacactgggtttcctaaaatttttgaaatgtgtgcatgaacacaaactatagatcttacttgtcaatttgctcaaatacgcatctgaaaaatcatcttcatcctaacaattcagtaacaaagtcacatatgatgtctgggaaacctcctaattgtaagtcaatgaaagcaaggcaactatcgaaaaatgagcaaagcaataaatgttagcaaaattaatgttcctatataaacacagatgtcaatatatcattgatatattaacacagccaagctaaatgttgcttatttgaactgaacttgagtattaaataatctacataaatcctacagggaaaagcagacagacataagaagagttttcaaatttta

SEQ ID NO: 483739 - DNA, 1000 bp, Homo Sapiens; identical to SEQ ID NO: 309926

SEQ ID NO: 483740 - DNA, 731 bp, Homo Sapiens
ttggctttcaatgcttcatcagcttttgcagcagcttcaagaaccagctgtagtctggctttggcctgttcagctggtggcaagatgttctaaatccagctttgatgtttccagattcccacgtttgatgttatgtattccttgtccttccctttatcctctcccttttctcttttctctttatctctgcccttacgtcgttctctatcccgagaccgactacgcgttcttctgtgactggacctttcactgctacgactatgagaacggagacgaggtcttgacctggaccttcttgttctgctttttgacctagacctctgaactctataggatttccctcgaccccttgaacgacttcgacttcgtttccttctggagccataagaagagctactgcttgatcgatgcctgcgtcttctatcataagaatgtgaacgaggctgaagatctctggaccaagatcttgactttgatcttgatttccttcctcctttctttcggctgtatgttctactatctgaagaactgctcgaggaggaccgtctacggtgtttcttttttctcttgcttctgctttcttcttcagtatctgatgaccgacgtcccatttctgggtccagacctttgggctcacacctcccgttgacgtgcaagcgccgcagtccctgagtcgtttctttagatcagggcgccgccggcgtccaccgaacttgcttcagtttaagctc

SEQ ID NO: 483741 - DNA, 658 bp, Homo Sapiens
tcccaggcgggacccgcgtgccctggagagtctgtgcctcacagggatgcagctgtggtctgagtcctctggccataatactgttagatgcccaaccaacatcaaattttatatacgggaacacctcgtttgaaaataatgacatttctgtgtgcttcttttcagaagccggggcttttatttgttttgcatctgtcccattggcaggacactctaggacaaggtgaaataatcaggatgacagagtgcctgtgcctctgcccgtgacaaggtgaaataatcaggacgacagagtgcctgtgcctgtgacaaggtgaaataatcaggacgacagggtgcctgtgcctgtgacaaggtgaaataatcaggacgacagggtgcctgtgcctctgtccgtgacaaggtgaaataatcaggacgacagggtgcctgtgcctctgcccgtgacaaggtgaaataatcaggacgacagggtgcctgtgcctctgcctgtgcccgtggcagggtgttcttcaggcttccatcacgtctgctgttggctgggtgtggcaaagaggtgactgtattgggacaattttcttctttctctagataactaacagtgtttatcagggatgagagttgggttaatgaaatctttttttgattgagacaatcc

SEQ ID NO: 483742 - DNA, 816 bp, Homo Sapiens; identical to SEQ ID NO: 309929

SEQ ID NO: 483743 - DNA, 369 bp, Homo Sapiens
cggcacgaggggctattgaataaagacccaatcctaccagatctttagttctaaagggcaacttgactgtgagtaggagggcccccaagaaagggaggaaagtccacacccagctaaccacacaacagggcttcattatggaaatattttaacaaaagtacatgttattaccaaccaaagagatgcatgtgcaatagaagccttccttaaaaacaggctaaataacctcattttatgcagcagtttaatctgagaacagagggaaaggtgtgcagtggttccagaggggccttatattctatttttagtctagatattttttgtttataaattcccaaggaattgttaacactttggtgacacctaatg

SEQ ID NO: 483744 - DNA, 1000 bp, Homo Sapiens; identical to SEQ ID NO: 309931

SEQ ID NO: 483745 - DNA, 1000 bp, Homo Sapiens; identical to SEQ ID NO: 309933

SEQ ID NO: 483746 - DNA, 1000 bp, Homo Sapiens
caattgtatctaccacccccacccccacccccaaattagttgttatccttgtcatagccacctaccagaggttacagctgaagctgattaaagccagtgagaagtaacagcttcagtatttttaactcccaataaacccttctcttcctttatcctcccccttaaagagaaaaaaaactgctcctcttaagtggtcccgggattatttccagaataaaacttcacttacagatacaagctttcaaaggagcatggcatgaacatctgaactctaagcgcctccatcttttttcctttaaggtgttctgcaagcccttggcgaagagtgaaagtcaaagttagttctggcactggctgtgtcactaggggtggctcctgataaggccctggaaactccaatccaaacacagctctgtgctagaacggtgcctggtttctgtctgcaacagcagacctgtttaatccagtacctactgtacctgcaggacaaaaacgctgcctcacaccacaatgagggctactcaaggacccaggcacggccagggaggcagcccagcagccaggcaagcacctcgggaagcttatttagccttacccagctccggtactggctgaggcttgcagagactgcacattattagagaacttaaaaggagaggtaatttcacataccagtgaattgtcaacacttactggagtcacagaatctaggagggaggactgtggaactgcttgtgtcccctctcagtttgggagctctcgggcatcaactcatcacacaactctaggtgttttgcatctgtgcacaggcatttttggagcttgataattgaatatgccctccttgctgacaggctagagatccaaaacagcattccttaccctcagaccccaagaatattaggagggttgtccttgcccggttctggtggaagtaaaacacaaactgctcctaattatggccaccatctttcaggacacacaaatcgttaggccataa

SEQ ID NO: 483747 - DNA, 1000 bp, Homo Sapiens; identical to SEQ ID NO: 309935

SEQ ID NO: 483748 - DNA, 613 bp, Homo Sapiens; identical to SEQ ID NO: 309936

SEQ ID NO: 483749 - DNA, 1000 bp, Homo Sapiens
gacagtttttgcttttattggtcaagaattctttacaaaacccacacacacacatccacacacacacacacacatgatgcctgccctgctgtggtcactctggccctggtgtctcctgggatcaggccctcctggcctctcccaggggaaaccatcctgcagcccctctgggtcagcagtgaaggagcagagagagggaacctccttttctgcttctctgctcaggaacagaggtctgtgccccacctgtcggggagcaagtggaggtgacagagaaacagcatcctcctctttccaccgttgagcccccggagttgccagcctaggcccccaatgtcacagctgccaaggcctgggggtcatctgctgattgaaccttccccatccccattttgcagattgaaacacagcggtccaaagacagcggacgagtcacccaaggtcacggtgctggagcacagtggcagagcagggacggggactctgctcttcttgacctccaggaggtggcaagtgtgaaacctggaccctgctccaccccccagggaagggcagagccagggcctggggcaggaagggagtgcccagagatgatccctggagcccgtgcccagggaaagcagcccccagggcagctgagtgagcagcagggtctggccaggactataaaggtttgccaagggtgccctctgtgactgcccgtgtggcttgctcagggatgcggcccgggtcggtcaggatactggtagatgtgcccagctggcgtagggagttcaggacagctgggtgggagacagagagagagagacagacacttcctggggtcagggccctacccttggatgtggaaccaaagggatagggggaggtattagttggcaagactgtcaccccctcctagaacctctgtctacaggcgtctggtggccagaggaccatctgggggatgcggggtggccacaaccctaggctgtgttgatggcaagctggatgtgggatc

SEQ ID NO: 483750 - DNA, 1000 bp, Homo Sapiens; identical to SEQ ID NO: 120146

SEQ ID NO: 483751 - DNA, 1000 bp, Homo Sapiens; identical to SEQ ID NO: 120147

SEQ ID NO: 483752 - DNA, 1000 bp, Homo Sapiens; identical to SEQ ID NO: 309939

SEQ ID NO: 483753 - DNA, 1000 bp, Homo Sapiens; identical to SEQ ID NO: 309940

SEQ ID NO: 483754 - DNA, 1000 bp, Homo Sapiens; identical to SEQ ID NO: 309941

SEQ ID NO: 483755 - DNA, 1000 bp, Homo Sapiens; identical to SEQ ID NO: 309942

SEQ ID NO: 483756 - DNA, 1000 bp, Homo Sapiens; identical to SEQ ID NO: 120148

SEQ ID NO: 483757 - DNA, 1000 bp, Homo Sapiens; identical to SEQ ID NO: 309944

SEQ ID NO: 483758 - DNA, 1000 bp, Homo Sapiens; identical to SEQ ID NO: 309945

SEQ ID NO: 483759 - DNA, 1000 bp, Homo Sapiens; identical to SEQ ID NO: 120149

SEQ ID NO: 483760 - DNA, 1000 bp, Homo Sapiens; identical to SEQ ID NO: 309947

SEQ ID NO: 483761 - DNA, 1000 bp, Homo Sapiens; identical to SEQ ID NO: 309948

SEQ ID NO: 483762 - DNA, 1000 bp, Homo Sapiens; identical to SEQ ID NO: 309949

SEQ ID NO: 483763 - DNA, 1000 bp, Homo Sapiens; identical to SEQ ID NO: 120150

SEQ ID NO: 483764 - DNA, 1000 bp, Homo Sapiens; identical to SEQ ID NO: 120151

SEQ ID NO: 483765 - DNA, 1000 bp, Homo Sapiens; identical to SEQ ID NO: 309952

SEQ ID NO: 483766 - DNA, 1000 bp, Homo Sapiens; identical to SEQ ID NO: 120152

SEQ ID NO: 483767 - DNA, 1000 bp, Homo Sapiens; identical to SEQ ID NO: 309954

SEQ ID NO: 483768 - DNA, 1000 bp, Homo Sapiens; identical to SEQ ID NO: 309955

SEQ ID NO: 483769 - DNA, 1000 bp, Homo Sapiens; identical to SEQ ID NO: 309956

SEQ ID NO: 483770 - DNA, 1000 bp, Homo Sapiens; identical to SEQ ID NO: 120153

SEQ ID NO: 483771 - DNA, 1000 bp, Homo Sapiens; identical to SEQ ID NO: 309958

SEQ ID NO: 483772 - DNA, 1000 bp, Homo Sapiens; identical to SEQ ID NO: 120154

SEQ ID NO: 483773 - DNA, 1000 bp, Homo Sapiens; identical to SEQ ID NO: 309960

SEQ ID NO: 483774 - DNA, 1000 bp, Homo Sapiens; identical to SEQ ID NO: 120155

SEQ ID NO: 483775 - DNA, 1000 bp, Homo Sapiens; identical to SEQ ID NO: 309962

SEQ ID NO: 483776 - DNA, 1000 bp, Homo Sapiens; identical to SEQ ID NO: 309963

SEQ ID NO: 483777 - DNA, 1000 bp, Homo Sapiens; identical to SEQ ID NO: 309964

SEQ ID NO: 483778 - DNA, 1000 bp, Homo Sapiens; identical to SEQ ID NO: 120156

SEQ ID NO: 483779 - DNA, 1000 bp, Homo Sapiens; identical to SEQ ID NO: 120157

SEQ ID NO: 483780 - DNA, 1000 bp, Homo Sapiens
gcaggattgtttttattgactatgacatggacttgttgcttacatttttttaaagtcatcatttatacagttatttaaactctattgggcagaaaactgaaaatacaattgtgagaattatactccatagtaaatacctatgtacttaatactgaattcttgtgtcactgagaaccttaaccctactctaagacatcttgcgataacctgcaactatcaattttttggagacatttttggtatttcggtcaagtgctgaaggggttttactccaaaatctagggctagaattcagcttccaacactctcatacccaggtaacacaattatgaatattcagaaatcaatacctcttagatcatcaatgtttcagagctatgcctgataaatgacatttgaaaaataataatatagaaataattagctgaatttatactcctgaagccacttcatctttaggctttatatttacagtgttgtccaggaggaactaaagaaaaaagttacactaattatttgtcaagctctattccagatgtctgcttaagacttgcagtttacgcagaggtgaaccattatcctctaaaattacaccacactacttcttgtagaactaatagtaaaatacatcaacccaaatcttatgaaggcagcacatctttaggagtaactagtatataaaaagtatcaacatcagtggtttgaatataaaaatttatttttaagtcaaagtatgcaacaaataaacctacagaaaacattttcccatcacaatctgttgctttaccaaataatattttgaaaacacattccttcagtcattataaagttcttaaaatacaaaagaaattaaatctgtaagaaagtctagtagaccagatgctgttgtcaagacttgtatgttggtgtttttgctttcagtacatcccacgccatccacctccactcatgccgccttgcccatagtaacctccactgcctccaccaccacggccttaag

SEQ ID NO: 483781 - DNA, 1000 bp, Homo Sapiens
gcaagagactggcaggagagaagagaggagaaacagagaaggagagagaaagggagagacagaaggagagaatgaacggtggcaagctagaaatctagaaggaaagcaatacaaggagagggagaaagacagaaagcagaaaaaagaaaagagaaggaagggaaaggaagaggaaagggggaaaaggcaagacaagagagggtaaaaggaagagacagagggagagagagaatgacagtggtgtataatttattcccttctgtggttcaagactcagtctccagccccaaaaggatcctaaaagtaacttgttgaaaataaatcccaaacaagaaccaacatagacagctatctgccctacccggctgttctacccgctcagcctgcgggtctttcagtacctggtggggccgcaggggcggggcgcccctggacaccgccactccacgtccccagtgtcaagtcacaaaaggcaagctcatcaaggcaaatgggttctaggagcccaggtccacgaggttggctgacatggggttgaggatggagtcctgcaggccatggtggtgttgcagtgggtccgctccacctccgcctggcaccggcactggcactgcgctggggcccggagggtggcccaggctgtgcagggacggcagcccagggggcggcgggctgaggagcagtgcggggctggatgatgagtggtctggcgtccccgatggagtcttctcatcctccgagctgcctaacaccgacttgccgctgccattcagcgggttgtggctgttagaattggagttctcgttgttctccctgcaagtgcgggagcaaagcagcggggtcagcaggggacatcgagaccacccagcgccatctcagtcacagtcagagccagccaccagcctcgggagacagatcccgggcttgtggcctgcgggtgttttcggtttctaccatttcctcgacctggtctgggttctcctttctgcccgttctctcc

SEQ ID NO: 483782 - DNA, 1000 bp, Homo Sapiens; identical to SEQ ID NO: 309970

SEQ ID NO: 483783 - DNA, 1000 bp, Homo Sapiens; identical to SEQ ID NO: 309971

SEQ ID NO: 483784 - DNA, 1000 bp, Homo Sapiens; identical to SEQ ID NO: 309972

SEQ ID NO: 483785 - DNA, 1000 bp, Homo Sapiens; identical to SEQ ID NO: 120159

SEQ ID NO: 483786 - DNA, 1000 bp, Homo Sapiens; identical to SEQ ID NO: 309974

SEQ ID NO: 483787 - DNA, 1000 bp, Homo Sapiens; identical to SEQ ID NO: 120160

SEQ ID NO: 483788 - DNA, 1000 bp, Homo Sapiens; identical to SEQ ID NO: 120161

SEQ ID NO: 483789 - DNA, 1000 bp, Homo Sapiens; identical to SEQ ID NO: 120162

SEQ ID NO: 483790 - DNA, 1000 bp, Homo Sapiens; identical to SEQ ID NO: 120163

SEQ ID NO: 483791 - DNA, 1000 bp, Homo Sapiens; identical to SEQ ID NO: 309979

SEQ ID NO: 483792 - DNA, 1000 bp, Homo Sapiens; identical to SEQ ID NO: 309980

SEQ ID NO: 483793 - DNA, 1000 bp, Homo Sapiens; identical to SEQ ID NO: 309981

SEQ ID NO: 483794 - DNA, 1000 bp, Homo Sapiens; identical to SEQ ID NO: 120164

SEQ ID NO: 483795 - DNA, 1000 bp, Homo Sapiens; identical to SEQ ID NO: 309983

SEQ ID NO: 483796 - DNA, 1000 bp, Homo Sapiens; identical to SEQ ID NO: 309984

SEQ ID NO: 483797 - DNA, 1000 bp, Homo Sapiens; identical to SEQ ID NO: 309985

SEQ ID NO: 483798 - DNA, 1000 bp, Homo Sapiens; identical to SEQ ID NO: 309986

SEQ ID NO: 483799 - DNA, 1000 bp, Homo Sapiens; identical to SEQ ID NO: 309987

SEQ ID NO: 483800 - DNA, 1000 bp, Homo Sapiens; identical to SEQ ID NO: 120165

SEQ ID NO: 483801 - DNA, 1000 bp, Homo Sapiens; identical to SEQ ID NO: 309989

SEQ ID NO: 483802 - DNA, 1000 bp, Homo Sapiens; identical to SEQ ID NO: 120166

SEQ ID NO: 483803 - DNA, 1000 bp, Homo Sapiens; identical to SEQ ID NO: 309991

SEQ ID NO: 483804 - DNA, 1000 bp, Homo Sapiens; identical to SEQ ID NO: 309992

SEQ ID NO: 483805 - DNA, 1000 bp, Homo Sapiens; identical to SEQ ID NO: 309993

SEQ ID NO: 483806 - DNA, 1000 bp, Homo Sapiens; identical to SEQ ID NO: 120167

SEQ ID NO: 483807 - DNA, 1000 bp, Homo Sapiens; identical to SEQ ID NO: 309995

SEQ ID NO: 483808 - DNA, 1000 bp, Homo Sapiens; identical to SEQ ID NO: 309996

SEQ ID NO: 483809 - DNA, 1000 bp, Homo Sapiens; identical to SEQ ID NO: 309997

SEQ ID NO: 483810 - DNA, 1000 bp, Homo Sapiens; identical to SEQ ID NO: 120168

SEQ ID NO: 483811 - DNA, 1000 bp, Homo Sapiens; identical to SEQ ID NO: 120169

SEQ ID NO: 483812 - DNA, 1000 bp, Homo Sapiens; identical to SEQ ID NO: 120170

SEQ ID NO: 483813 - DNA, 1000 bp, Homo Sapiens; identical to SEQ ID NO: 310001

SEQ ID NO: 483814 - DNA, 1000 bp, Homo Sapiens; identical to SEQ ID NO: 120171

SEQ ID NO: 483815 - DNA, 1000 bp, Homo Sapiens; identical to SEQ ID NO: 120172

SEQ ID NO: 483816 - DNA, 1000 bp, Homo Sapiens; identical to SEQ ID NO: 310004

SEQ ID NO: 483817 - DNA, 1000 bp, Homo Sapiens; identical to SEQ ID NO: 310005

SEQ ID NO: 483818 - DNA, 1000 bp, Homo Sapiens; identical to SEQ ID NO: 310006

SEQ ID NO: 483819 - DNA, 1000 bp, Homo Sapiens; identical to SEQ ID NO: 310007

SEQ ID NO: 483820 - DNA, 1000 bp, Homo Sapiens; identical to SEQ ID NO: 310008

SEQ ID NO: 483821 - DNA, 1000 bp, Homo Sapiens; identical to SEQ ID NO: 310009

SEQ ID NO: 483822 - DNA, 1000 bp, Homo Sapiens; identical to SEQ ID NO: 310010

SEQ ID NO: 483823 - DNA, 1000 bp, Homo Sapiens; identical to SEQ ID NO: 120173

SEQ ID NO: 483824 - DNA, 1000 bp, Homo Sapiens; identical to SEQ ID NO: 120174

SEQ ID NO: 483825 - DNA, 1000 bp, Homo Sapiens; identical to SEQ ID NO: 310013

SEQ ID NO: 483826 - DNA, 1000 bp, Homo Sapiens; identical to SEQ ID NO: 120175

SEQ ID NO: 483827 - DNA, 1000 bp, Homo Sapiens; identical to SEQ ID NO: 310015

SEQ ID NO: 483828 - DNA, 1000 bp, Homo Sapiens; identical to SEQ ID NO: 310016

SEQ ID NO: 483829 - DNA, 1000 bp, Homo Sapiens; identical to SEQ ID NO: 120176

SEQ ID NO: 483830 - DNA, 1000 bp, Homo Sapiens; identical to SEQ ID NO: 310018

SEQ ID NO: 483831 - DNA, 1000 bp, Homo Sapiens; identical to SEQ ID NO: 310019

SEQ ID NO: 483832 - DNA, 1000 bp, Homo Sapiens; identical to SEQ ID NO: 310020

SEQ ID NO: 483833 - DNA, 1000 bp, Homo Sapiens; identical to SEQ ID NO: 310021

SEQ ID NO: 483834 - DNA, 1000 bp, Homo Sapiens; identical to SEQ ID NO: 310022

SEQ ID NO: 483835 - DNA, 1000 bp, Homo Sapiens; identical to SEQ ID NO: 120177

SEQ ID NO: 483836 - DNA, 1000 bp, Homo Sapiens; identical to SEQ ID NO: 310024

SEQ ID NO: 483837 - DNA, 1000 bp, Homo Sapiens; identical to SEQ ID NO: 310025

SEQ ID NO: 483838 - DNA, 1000 bp, Homo Sapiens; identical to SEQ ID NO: 120178

SEQ ID NO: 483839 - DNA, 1000 bp, Homo Sapiens; identical to SEQ ID NO: 120179

SEQ ID NO: 483840 - DNA, 1000 bp, Homo Sapiens; identical to SEQ ID NO: 310028

SEQ ID NO: 483841 - DNA, 1000 bp, Homo Sapiens; identical to SEQ ID NO: 310029

SEQ ID NO: 483842 - DNA, 1000 bp, Homo Sapiens; identical to SEQ ID NO: 310030

SEQ ID NO: 483843 - DNA, 1000 bp, Homo Sapiens; identical to SEQ ID NO: 120180

SEQ ID NO: 483844 - DNA, 1000 bp, Homo Sapiens; identical to SEQ ID NO: 310032

SEQ ID NO: 483845 - DNA, 1000 bp, Homo Sapiens; identical to SEQ ID NO: 310033

SEQ ID NO: 483846 - DNA, 1000 bp, Homo Sapiens; identical to SEQ ID NO: 310034

SEQ ID NO: 483847 - DNA, 1000 bp, Homo Sapiens; identical to SEQ ID NO: 310035

SEQ ID NO: 483848 - DNA, 1000 bp, Homo Sapiens; identical to SEQ ID NO: 120181

SEQ ID NO: 483849 - DNA, 1000 bp, Homo Sapiens; identical to SEQ ID NO: 120182

SEQ ID NO: 483850 - DNA, 1000 bp, Homo Sapiens
tccagcttgtcttgctagagttactgcataatccatgcattcctgccaaggatcagccatcttctgaaaatatttgacaaatatctgtacaaagtagttataactgtcttagaagtcttaattatagaatagttagttcacaaaaacgtcttaattagaaacagactgtcatttcaggattcaccccctgccctagagtttttcccaagatttatgcctatacccagtaaaaaacatttctcacctaaattacctaatttctatatcaaattattttcataaagactattctatgaaattgcttcccagtgtgtctgtaccatattacatttttttaaaaaaccaaaacattcgtttggagaatagataagaaacaacacaagaaatactttaaaagttaggataatattttggaggagaatacagtgaaaacgagaaagaacactgggaatactgaaataaaagaagcttgaagggaagcagcaaaaggtacttgaaaaaattatgtgtaaagatgaagaacttaaggttcagagatgagaaataatttgcccaaaattacagacaaatgacacagaacttgaattcaattctgattttaaagtccatttttctttctattataacattctgagaaaagaaaattccaggaccaaaaaaaataagaaaaaagcaaatttatttccctgagtttcacagagggaaaaaaaaacccaacatatatttgtgttctaaactgtccagttttccactgacttctgaagactaaaataactcaccactggcttgatcacactctgaagtctgtacctagcacagtaaagctttttaagctgtcagactaaaaactgtggcaccatttataaaacaaccctaattttgtctcctttccaatagaaaataatagacacagagttacatcttgaagactattcagaaactcctatcttggggcccacattataggaaagaggacaggagtggaaaggagggcaaaaga

SEQ ID NO: 483851 - DNA, 1000 bp, Homo Sapiens
atcattgatttacttttttttttttttttttttttttttttgagagagtctcgctctgtcacctaggctggagtgcagtggtgcagtcttggcccactgcaacctctgcctcccgggttcaagcgattctcctgcctcagcctcccgagtagctaggaccacaggcgtgctccactgtgcctggctaatttttgtattttttagtagagatggggtttcaccatgttggccaggctggattttcttttaagcctattgaatgacctgtgcctatggtatatatattatttattatttgtttagagacagggtctcactctgttgcccaggctggagtgcagtggcacgataatagctcactgcaagctcaaagtcctgggctcaaatgagcctcctgcctcagcctcctgagtagttgggactacagacgtgtgccactgtgcccagctaattttttttttttgtagagacaggggtctcactatgttgaccaggctagtctcacagacgggttttcaccatcttggccaggctggtcttgaactcctgacctcgtgatccacccactttggcctcctaaagtgctgggattacaggcatgagccatcacgcctggccaagatgagtaaattttttgatgaatccctatcaactctgaaaccagatagctttggctaacagtagaactcatcatctgaacccagacacagatttaggtaacctttttttgtaaacctcctaatatagagagttggatttggaatgtgaaagatacttcatattcttcccggcacacacacacacgtgtcttttatgtgtggcttgtgtgaatgtgagtgcgtgtctctaggctctacatgtaggatgaggtcccctggtccttatctgctctcctcatccccaccttgttctaccagaaccagaggaagagatcattgccgaggactatgacgatgatcctgtggactacgaggccaccaggttggagggcctaccacca

SEQ ID NO: 483852 - DNA, 1000 bp, Homo Sapiens; identical to SEQ ID NO: 310038

SEQ ID NO: 483853 - DNA, 1000 bp, Homo Sapiens; identical to SEQ ID NO: 310039

SEQ ID NO: 483854 - DNA, 1000 bp, Homo Sapiens
tttttttttttaaatatttcaaatggatggtgtttcaggtcagacctcatttttgtaatagtacatggagtctgttctttaacaaattgtattcaaccttattgtggattaatattctggtaatatggttttactttctaaaaaactagtcttcagaacagtctagcaaaagatctattgtagtcagctctaaaattgttttcctggtgcttgagaattaaaggcttttgaagtaagttaaataggccatctctgttgtcactgcctcttgtataacaatggatgttctacattctctcttctcacccctgttcttggtgcttctgagcaagatcatgcacacacttaagcacaggactttcaggtgcatgaacctgagagtccacaaagcttccggctcctactcagcattaagatgtcaaccatagaaattatggtccctaataaggcttgagaattgtgctagccaatgaattgattgagacattcaagtcattggatatgggtatacagatgagctcagatttcaggaaacttcatcacagtaacgtctttaattattaatattgactcatttttctgaatatgtgtatgtcaccgtgatgacaaacactaacaagttaataaatacaatcttcactagtggttgttgccatgtaagatggctcttattcttaaagcaatattaatgggtgacagattggatgatgttaggcacctgctaaatttggggatctaaagaaggcccagtcctatattcacgtatctcatattgtacagttctaatgtggcagaaatttaaaaaatgattgcagtacggtgataaatgttataacagagacatatgcaaaattatctttaggtatatggagaaaaaagtaactcagtatgcttacagggaaaatttgaccaggaagactttatgaagatgacatttaagatcagtcctaaagatgaatagaacttcatcaggcagagatgagggaaaggacactctcag

SEQ ID NO: 483855 - DNA, 1000 bp, Homo Sapiens
ttttttttttttttttttcataatttaaggatctctttatgttcgtcacaaaggttatcaatgcttttaagagcatctgcatagttttgttatttaacctttacacacaatacatgtttttcaaactgcaaagttgataactaatatcattttcaaataggcatagtataaccttaaatattacatgattcaaattattattatttttttttacaaagaaataaacctgtaaaggatcactgcactacagttgtccattaattatctgcggcaaaactgggatcctagtagaagcttcagcatatggatggttcctctactgcctgggcaccctctgtgacagctttgacacatttggccattgtctgtgaggctctgctaattgaatctgtcatgtagaagtcttttatagttagctgaggtggaacaagtgggtcagcaagaagctgctggttcactagctttgagagctcatttgcttgctggaagtaattagccccttcaatatcatcatatcgaacaagattaggagagacttcttccaatctgttccttacttgatccagagtatcatatggaagagtcattccagcaatctcagagagtgctcttataattttccagtcttctcttgccaagccaggaggtgtcactgctaccttagtctgctgagctctaccctcagtgttgacatatgtagcagacttctctgtgtaagcagctcctgggagaataacatcagctatgggagccccaacatcaccatgatgtccttgataaataatgaaacaatcctttggcaaatcctgtcgtgtgatacaacctccatctgctcccaggagaaacagcaccttgggagggttcttccgaattgcttccaccccaggcttatagccaaggtccaaagcagctacttgacttgcaatcctatgaaggatattcataactttccaatcaccagtaacaccactagtcatccgaatcttttgtgcaatgctag

SEQ ID NO: 483856 - DNA, 1000 bp, Homo Sapiens
ttttttttttttgttgttgttgttttccactttctcaataaatagagagagccacaggggagcagagggttccttcgctaaaacacagatacacacgaagggttctgtggcaccctgatccctgcccacctttccatgagatgatgagaaacagccaaaaaccttcggttcttgttctttaagtgttctcaatagtgcctattttttcatccataccatgacactgtggaatttgtcccaaatctttttaggacagttggtgaccacaaagtgaccatgttgcatgacacttccaaatctcaataagatctaggagacagagtactgtcttgtactaaaatttgatattcactctgtgtatctttcccactgtggttgtttctactttatacctggtgtcctctgtaaaatctcttttttgtttttcagattatctaggcatttgtctcccacttcctcatattcaatgagaattgcatgcctgccagacacattatttcttgtttcatgatacactttatcctttgccaggagcccattattcttacagcttaagccatagccagaaacccaaatcctattttgcaatacttatctatgtagccagatgatcatatcctacatccccctttcacttccaaatttagcttccaaagatagtccagcttcccagcctcagaatcacaacttccaaggctgacatggagggtccatgtaatcattgtgttcatcaagcaccttaaactaaaatatattgtgcccccacactgatagacaatgaatagcatctcctcctgttgctaggcaaccatgctgattggcagcacatgctcctgttattccacctagtgatggaagcagcacctattcactggctctggagtcagaatggctggcagcagcagcaaagggcacttcactgatgttggattcccattaatctagaggcaaaaaggattccagaatgggaatgggaataagaagaatgttcacctcatct

SEQ ID NO: 483857 - DNA, 1000 bp, Homo Sapiens; identical to SEQ ID NO: 310041

SEQ ID NO: 483858 - DNA, 1000 bp, Homo Sapiens; identical to SEQ ID NO: 310045

SEQ ID NO: 483859 - DNA, 1000 bp, Homo Sapiens; identical to SEQ ID NO: 310046

SEQ ID NO: 483860 - DNA, 1000 bp, Homo Sapiens
ttttttttttttttgcctcataatctggaatctttttggctagagtatcaatgaataacagattgaaaatattcctttcatcctttatttttcctccttcatcttaaatcagttcagctactccagaaaaaaaaaggatgttagtggcaataggtaaaatttgaaaggcaaaatgtgacttattgaaattgaatgatgggtacaagggaatcatttattatgtactctttttgtatgtttgaaagtttccacaataaaaaagattttaaatgcacccagaaaataaagtaaatcagcccaatgaacagatgaatttattgcccatttataatcagatttgaactcaggaaattttaggcacagtttataaaactgaccgtagctcaacgggttataattttgttatttagtgtggtcagtccaggcattaaagcactttgaattattaccttaatgacaaaagttcaggcctgaaactaccaaatagggaaggctgtcatcacttcctgttgattcttgaaatttaattccttttcaaatctcatctctttctttttttcctggttaaagtcacttagaaattgtggctattttttgccatagcagctgtaatacttgggtctgaatcaaagactttacattttatcacttttttcttatctttttcttcagtgtacttaatttactgccttgagtcaaacatgttctatggtgccaatctgttacagtggaaagaacactggattgagaggcatgagtttctagttccagctttctcgtgaactagtttggtgactttggacaattatttcactttttacaaccttctaacctgaaattctcttcaattcctcatttagtgatttttaaccatttggtatcatttttagaaatttacctttcctaggttaaggcaattgacattctgcaatttgcccccgtctggcttacattcatcctgatggtttcaatcccctcaagtctttactttgtgttttgt

SEQ ID NO: 483861 - DNA, 1000 bp, Homo Sapiens; identical to SEQ ID NO: 310052

SEQ ID NO: 483862 - DNA, 1000 bp, Homo Sapiens
tttttttttttttttgagacaggatctcgctctgttgcccaggctggagtgcagtagtgcaatcatagctcactgcagcctccaactcctgggctcaagtgatccttccaccttagcctcctgagcacctagggctacaagcatgtgccaccacacctaatttttcaaaaagtcttttgtagagatgggatctcactctgttgcccaggctggtcttgaactccagggctcaagtggccctcccgcctcagcctcccaacatgctggaaccacaggcatgagttactgcacccagttcaatacagactttttaagatctgtgatttttgaaagttagaattcatgcttagacccagctgtattttttgaatcacttcattcatgaaaaatgaagtccagaattcaaataaggacaagtgtaatctccatggtttccgccagacagaaggacaagtaaatcacaagagaggctaaactatgtgtcctgtgtgtcaacagagtctaggattatcagctcctgggctattttgacgatccatctttaggttgggtgggaaccccacgattctgcattaagctgattttgtcatcttttcaggaggcttactctgcacctaagctattcctcttctctttgaagttctagttggcaaaggaccgagttatctgaatctcacagtatttagttttttctggcttaagtttctggtctcagacttagggcttctgattgagagcacctcatgaatattcaaaggagatacagcagcacattttaatttgatctaattagtgacagacgacgccttttccttttgagatattgatttgtttaaagtagcacacagaccttgtggctgctattccattggcatttctgacagagtatccctggtgtaagaatagagctagctgcataaatctgttagttggtctagtatgtttatcaagtatctgatgcctgaactcaggagtctaaggaataactagcaaatatgac

SEQ ID NO: 483863 - DNA, 1000 bp, Homo Sapiens; identical to SEQ ID NO: 310056

SEQ ID NO: 483864 - DNA, 1000 bp, Homo Sapiens
tatttttagtagacagggtttcaccatgttggccaggctggtctcgaactcctgtgacctcaggtgatccacccaccttggcctcccaaactgctgggattacaggccacaacacccggcccgtagttgccttttaagggccaccccaagctgaagccaaacacctgagggggcaggaaaggcaaaggatctagactgtcgtggagcagctcatctcacgacctgcctgggcctcgcacaactcccctgtgccctgctcacccgtctgccctcatcagtccaaactgcatccatctaaggatgatgacgtagcaaccagcatcagcctcctccggaacccaaaccctgatgaaagctcttgttaagcaagcaattctagaggcttcttccaggacaatgcttgaatgtgaggtctcaaaggcatgaggttttaagtatttgagttctacttgattaagaacaagattaaaccaattcaagaatggggaaacactgatccataaaaactacatcgtttttaaaaaacaatgtggcccaagctgagaatgacacccaggagtccagaatctatagctgcttctcccctattctgaagggggagcttatgaagaacctcatgaaaaactaaagcaaaacggccaggcacggtggctcatgcctgtaattaatcccagcattttgggaggccaaggtgggcgaagaagttcgagacaagcctggccaacatgatgaaaccttacttctactaaaaatacaaaaattagcccagtgtggtggcaggtgcctgtagtccctgctactcgggaggctgaggcaggaaaatcacttgaacccgggaggcagaggttgcggtgagccaagattgcgccactgcactccagcctgggcaacagagtgaaacttcatctcaaaaataaataaaataaaatacagcaaaactattctgttgtggccagtagatttcaagactggcttataattaggcttatcggaagattaa

SEQ ID NO: 483865 - DNA, 1000 bp, Homo Sapiens
agagtctagctgtgttgctcaggctggagtgcagtggtgcgatctccgctcagggcaacctccgcctctcaggttcaagtgattctcccacctcagcctcccaagtagctgggattacaggtgtgtgccaccatgcctggctaatttttgtatttttagtagagatggggtttcgccattttggccaggctggtctcaaactcctgacctcgggtgatcctcctgcttcaggcctcccaaagtgttaggattacaggcatgagccactgcgcccggccccatttgaatttatcatctatttaaactactttaataacaaaggaaaaagaaaaaaaccttataccttttagccactatctcatccagccaatcaacagagatataaaaagtactctctacttacagaaaaagagaaacagctgcttcttaggaaagaatggtaggactctaggggcctttccctttgaaaaatttttaattttgttattacactagtttaacaataaaagccagtgtagacaaaagacaactaaactaaaccaaaaaaccccaaacacacacctcactgtttaaaagagtgccagtaatcctgagggcggagtcatgtgggaaaaaaaagcctctgattgaagactgaatgggagtgaagattgttatgcctggccagactggacttcagaggcctcccccaaaaaggtcaaatgaaaactgacctggcaattctgattgtaggaatttgtcctaataggataaatatgcaaggtacatatagatgatgttcacttgcagaattatttataatagcaaaaatggaaaacaaccgcatgtctgatactgaggattaaattatgggatgtgtctccactatgtaaatgctccatagttattgaaaaatgatgatcttgctcaataattgacatgctggaaaaataagctgttaacagtggctttttctgttggagggattaaaggtaattttaactttgttctttttagcttc

SEQ ID NO: 483866 - DNA, 1000 bp, Homo Sapiens; identical to SEQ ID NO: 310058

SEQ ID NO: 483867 - DNA, 1000 bp, Homo Sapiens
tatgacctactttatagaaacgtcagaggattcttttatggcctgcttcaggggagaagggtgggagaagcttacagagtgaacttcctgtttttgctgttttctgaaatgccaagatgccatattttgtggtagtgtgttctgaaccccatcaatctaaatgagtggttttcaaagggcaagcagttaggaggtgattctgcctcccaggagacatttggcaatgtgtgaagatgtttatgactgtcataactggaagtgggggtgctgctggcatctggtgagcagagaccagacatgttgctaaacatcttacaacacacagagcagccctcagaacataatattatgccatccaaatgtcagtagtgctgctttgaaaaacctagattaaaatggaatgtctaaaaacgttgaggtacaaaaaatcacagcaagcaaattaaattgctggagtaataaatttgttactaggcaaaaatggttaaagcatagtacagtactttgtgatattgtattgatatgcagtcaataatggagatgagactgtctatagtctttttgcaatcaataataggatcaaaaatattaagcatgcattaaacaaatgtgaggggaaattaaccaagactcaagagtaggatatgggtgtgtgtatttcaagcacctagaacatctacaatagaacatatggcaaaaataatatataaatagtttagtttgttttgttttctcttactcgttaccatgattgtttaatggctgaatctaaataattccttgagttcttatctatgttaatttttgttggcattcaaccttgtactgccccctttggctgtcttattcaatgtcatgactttatttgtcacatccatgaagatgatcccagctctgtttatctctccctaagttgacttctgagctactaattacctgctagacatttcaatctatatgtctacaagtaagatatgctgatttattaaagaaaatcctt

SEQ ID NO: 483868 - DNA, 1000 bp, Homo Sapiens; identical to SEQ ID NO: 310060

SEQ ID NO: 483869 - DNA, 1000 bp, Homo Sapiens
caccatcctccatgttgctgggcagttgaagtccccaggggcccctgctcagaagcgtgtcctgggggcaggggtgcagtgggggctgctggccacaggctcccaagcactgaccccacatccctgtgagcagaggcctggccccacccaggcctggataccacctcccatggccctgaggctgggctgcagtttcccgacagcctaggaccgctgggactgctgcctctccctctgctctgctctccccaaggccaaggtcgccctgcttctttcccaaccccaccccccccacatgccccagggtccctcctgtacatgacagggtcaccactcaccagtctctgcgggggcctcatctgtgactcctggaggggcccagcccggggtaaccactacccccccatctacggcgagaaatcagaggccagtggtgagcaggcagcgggggtggagggagactgagcagccctggaggccggccacctcacccctcgttgctgttgctcctgctccaggttccgctgcaggacctgctgctggttggcaatgacacgccggatgccgttgacaaagttgccctggtcatgggggatgaggccaatgaagattttcttctctgaagagtacaggagcataagcacgcggatctcacacgatgctttgtaggaaaagtgcacgcagccggcctggcaggcacagggcgtggtgtcaccagacagcaccacagggaccagcatccctccaaccacggcatcatgccgtgggctccatgagccaggcacagcctaactgctctgtcctcacaccccccacccaccctggaggtgggcccccttattgggatgacacggtggccaagagcaatgggtgggccaaaggccaacaggctctgtcgggaagggcccaagaacctgcatttcagagctcctgggcaggccaggctgtgtctggggccacctcaccacagccacctgagccaaccggccatggcttcaac

SEQ ID NO: 483870 - DNA, 1000 bp, Homo Sapiens; identical to SEQ ID NO: 310061

SEQ ID NO: 483871 - DNA, 1000 bp, Homo Sapiens
ctttctgagacacagtcttgctctgtcgcccagtctggagtgcagtggtgcaatctcggctcactgcaacctctctctcccaggttcaagcaattctgtctcagcctcccacgactatgggcatttttagtagagatggggtttcaccatattggccaggctggtgtcaaactcccaaccccaggtgatccacccaccttggcctcccaaagtgctgggattacaggcgtgagccactacgcccagcctgtattttttaaaagatgattctgatggagctggctcacagactggcatctgggaaccactggtttaggttcaaactattggcacatacagcttattttgttagcgtacagagttggagcaggatatttaaaaccgagtgtgccagaaaatctgaaatgtgtggctgcactttgggtgcacatgtcccccaaggcctccaacgctgcaggaaacccccctggctcttcgggaagatggcagcaaagttcacctcacctgatcactcatgtctccagactcccagagggcaaacaccttctgctcatccggggaagcagcagtctgggggggaaactgaccaaggcccaggggtgagttgcttgtccatctctaccccatggatccatttgcttgcctcatccctccctgtctgccccagcccagatgcaggaacatgggttccaatcccagcttctgctactcaccatctctgagggccttgggcagccacaaacctgtgcctctcacctcaccatggggaggaggccagcacaccccccagggcctgacagggcttcagcgagagggggagtgtgatgggcccagtgaaatgcccggcttcgagtctgcagatatcctccgtacagtggggaagctgcgtctgtttcccatcagcctggcaccaactcaactgtgctttaacacccagagtcctccctcctgaagatgccaaccctgatggaggggcgcccccttccccataactcttggg

SEQ ID NO: 483872 - DNA, 1000 bp, Homo Sapiens
accatcacttgtgcactcattcatttaacagacatttattaagcgtctacaatgtgccaggccctggggacacagagctggagaatgtacagtccctgccctcaaggagctcacagtctggggggacagacatgtaaacacatgagttacaacgcgctgcgtgaagtgtgtggcagaggtataacaaagtgctgtggggcacaacagagcgaccagtgaactcttcctgggcaggggtcagggaagccttcacagatcagtcaataaatacggtgccatgggagtgccttgcacaccacgggcactcacatcttgaatgctggtccactggaggcccttgggttgggcgggagcaaggcctacttctgcttcctcaggacaacttccccacctctgtcctgggaccacctgcccgcctgggcctgcagtgactaaggacgctgctcccactccaggggccagtgacagagagcagctatacagagggcccaccccgcaggatccttgacaggagctgagacagaacaaactgctgcttgtctccctaccctgggggctgtgatattcttggtaacatctctgagctggtctgtgaggtcacttcctcttttaacactgttgaggagactccaaaccctgtcttttcctcgtcttctcatgtcgattgggcaccagccattctcaggcaccagagcacagccccacacgggtgccccatcagacagggctgcccacagcagcctcctacacctgaactgggtttctctgcacactcacagccgtctcaccagctcaatgagctgctggatgtttttgttttggttcgacaagccgttcctgatgttttcgagtaggcatctcttcaattcaaatatggcttcactgtaggccaagctcactgcggccatgggaggtgctccgtgccacaggcctgggatgtgccagatgtgctgcttctcagggtcgcagaaggccaggcctgccagtgcccggaagccgt

SEQ ID NO: 483873 - DNA, 1000 bp, Homo Sapiens; identical to SEQ ID NO: 310066

SEQ ID NO: 483874 - DNA, 1000 bp, Homo Sapiens
tttttttttttttttttttttttttttttttttttttttttttttccataaacgaaaaactaaataaatttattccataaagattttaaacttctacaattcattaaaaagacataaattcaaaagtcaaaatggtaaaaatattcacaacatatgacaatcaaatggttaatttccttttataaagagtttataggaataaatgagaaagaagtaaacccaaataaaagtagacaaaggtcatgagcagttcatttaaaaagaaatacaaatatctataaacatacgaaaagataatcaccttaatatcattaataattaatattttctcccacatcagcaaaaatctgcatgtttgttaaagctgagtgttttaagggtgtgatgaaatggacaccattacacaggactgcctttcaggaaggttctctgccactggaaaagggtacagcttttctagagggcaataggtgatttctattaaaatatcaaagacacactccttgcccttgtacttcaactatttatctgggcttagtacaagttctcctagctacatgtacaaggatgctactgcaacatcatgccttagagaaaaaggcatagtatatttggtattgtaccaatgtcaatttcccagaattgatattatactacagttgtcaccactgggggaagagtactcagggactctatgtactacttttgcaacttcctatgagactataattacttcaaaataaaaagtgtttctttaaaaaaatcatggtgcataagtatttatggtttcttacaaagtatgaaaaggtaagggcaatccttgtttaattaaattcaaaatgagtgagcagaacatatgtaaccagaaggacaaatccacccttcccttttgtcaagcacatctgtgtgaagagaccaccaacaggctttgtgtgagcaacaaggctgtttattcacttgagtgcaagtgggctgagtctgaaaacagagtcagtgaagg

SEQ ID NO: 483875 - DNA, 1000 bp, Homo Sapiens
ccaagctgggccagatcggccggagcaagcgggttgttattgaagatgataggattgatgacgtgctgaaaaatatgaccgacaaggcacctcctggtgtctaactcccccaaagacaatgagttaagggagagaataagaacggcggtaacagttattggcaaaaagcatgaaaagagaaagcactttgaaatttattactagcttgctacccacgatgaaatcaacaacctgtatctggtatcaggccgggagacagatgaggcgagaggaggaggaggaggaggagaaggctctgggctcctctgcaaaaataaaaataaaaaaataaataaaattttaaaaataataaaaattcactatatacacatataaagaaataaaaagaagtctcagttgcagctatttgtcaaaattaatatccatttctttttatatacggtgaatattgcgcaattatagatctggattttgaaccacttaatgaagcggcaacaccaggtgttttgaggtgttggcattcttcgctgatttggctgttcccaatgtttacattatttaatcttgcaaaaatggttctgtgcacttggatgtgaaatgctgtccagttttattttttttatgttgttatccttggatgtacaaaaaattcagaaaatgatctctgtagatattctgttttattttggtcatctttagaagttatcaggaatgtgtttaaaacaagaagagaacttttctaaggaatgatacatagaaaagattttattttaaaatgagttgtaaagcgtgtgtttctttgttgctgcaagctatctgcccaagttaatgcaaatggacacattttttatgtcagaaaaacacacacacacacacacacacacacacacacacacacacacgaaaaacaaagaaaaaaatgcttgagctttttctaacttccccttgcagtctgttgtgtgagcagcctgtttatttctctaatattatgtcagtttat

SEQ ID NO: 483876 - DNA, 1000 bp, Homo Sapiens
gaatttgaaacatcatgaataaacgttgctatttctgttcatgaattttaagctgtttgttcttgcaaggttcccagtcatcccttcccaaatagtgctccttaaaattttcatcaggattttgaataaacaggaaatatgtccatttctctcagtattgattactctctaggctgtctgacagactcacactaaattgccaatctgcttcttaggagtcaggagtgaaaacatcagagtgggtgagagcctggtgggaggcctgtgagctgggagttatctgaatagagatagcatactggctgtggggctagactcctcaccatcatcttggaacatggctgggaaataggtccaaagggtcatttggacagcagatcccagcagcctctgtatgagatctgtccaggagactaaccccattatatgggatggcaagagggggaggtgactggaaatgagaaatgggaccaggctgaccagctacactctcagatagagactaccctgacaagggcctaggcacagacacagaagtagttgggtgcagggctctcaattcatccttcaaccctgcctgatatcacatcctcataacccacattgctgtggccatctgctccctctagtttctggcagattaaggccaaaaacaacagcaaagcatttttggatcaaggtcctgcctggggacagagaagtaaataatacaagtccctgttcttaagtaaggcactagaccaagacggtttgagcctaactagaggctctcttgcatagcaaagtctctggcacatgggttatattcaagaattgtttgaaccgaactgaatcaaaggaacctacattctgcaagttaagagcacctgtttggtgtcaggagcccaagacttctagattcaatcctggttctgacatgtacaattcagggactctggacctcagtttgcccatctgtaaagtgcactttgtctaccccacaagttgctatgagtagcca

SEQ ID NO: 483877 - DNA, 653 bp, Homo Sapiens
gccagtatctagcgtagctcctgccgttagggcaccctcttttcttgctaaaacaccgactcttcctttcccgtcagcttccatgtggtggtgtatgtgcgcttcccagggatcttgagagtgaagatctcgaaggatttcataggtatatttttttttttgctatgtcatcgtagtcagtggtggcagaaaagcgctgcaggcccagctcgttaggcttgagaagggcaagtgttttcagttagatttgggggcagttcaccctctggcgagttagggtggaatgtttgcccttgagacggcgtaacggaaaggcacggaggttgggcggtccaggttaatttgaaggctgattttggctgaaagtctggcgacaacatcggatcccacgtagcaactttggcctggcgcgaaagaaggaagctctgacccctgggagttgtggacaaaggctttgggctgtagaatcgatgccttcggatgattcccgtttgaggatgttgggagaaatcctgtgccatgtggattcgtcttcatttacagttcttcctagggactgtggctctcattggtcattcctttggtttttattttaaacatctacattataaaaggtggatcatcgtaaagaataattatgggttggtgtagat

SEQ ID NO: 483878 - DNA, 1000 bp, Homo Sapiens
ttttttttttcttttggctgtatactaggaatggaattgctgagtcatgtggaaatctttgtttaactttttgaggaggcatcctaccgggagtgacatgatacctcattatggattacatttgcatttccctaatgattaataatgtggaacatcttttcatatgcttattggctatttgtgtatctttggagaaatgtttattcaagttctttgctcattttttattggattgcttgtttttttgttgatttattagagttctttatatattttagaaattagacccttgtccagatccatgatatgcagatattttctcctataggttgccttttttgctccttgataatgttctatgatgtacagattgagtatagtatctcttatccgaaatgcttgggaccagaagggctttgaattttttcagatattggaactttgaattatacttaccagttaagcctcccaaatctgaactccaaaatgttcaaatgagcatttttgttgtgtgtcatgttggtgctcaagttcagattttctattggagcattttggatcttggattttctgatttggatgctcaagcctgtgccaagttttaaattttgataaaatccaatgtatctgctttgtcttttgatggttgggcttttggtgtcatgtaagagtccattgtcataaataaccaagggcatacagatgtatccctaagttttcttctaagagttctatcaatttaacttttctatttaggttattgttccatttttaagttaacttttgtgtatgccgtgaggtagggtctgatttcattcttttacatgttgatgtccagttatcccagcatcatttgttgaagagacttttacctattgaatggtcttggtactcttctcaaaaattatttaatcatatgtataggtttatttctggactctcaattctatttcattggcctacatgtctgttcttatgccagtaccgcattgctctgatt

SEQ ID NO: 483879 - DNA, 1000 bp, Homo Sapiens
gccgccgccgagggctggaggaagatggaggccccgccggacggcgccgccgacctcgtgcccctggaccgctacgacgcggcgcgcgccaagatcgccgccaacctgcagtggatctgcgccaaggcctacggccgagataacatccctgaggacctcagagaccctttctacgttgaccagtatgagcaggagcacattaagccgcctgttatcaagcttctcctgtccagcgagctgtactgccgtgtctgcagcctcatcctgaaaggggaccaggtggccgccttacagggacaccagtctgtcatccaggccctgtcccggaaagggatctatgtgatggagagtgatgacacccccgtgacagagtccgacctcagtcgcgcacccataaaaatgagtgcccacatggcaatggtggatgccctgatgatggcctacactgtggagatgatcagcatcgagaaggtggtggccagtgtcaagcgcttctcaacgttcagtgcctcgaaagaacttccgtacgacctcgaggatgccatggtgttctggatcaacaaggtaaatcttaaaatgagagagataacagagaaagaagttaaattaaaacaacagttattggaaagtccagctcatcaaaaggtccgctatcgacgagagcacctttctgataggcagtcaccctacttcccgttgttggaggatttgatgagagacggcagtgatggtgctgctctcttagctgtgattcactattattgcccagagcagatgaaactggatgatatatgcttaaaggaggtaacgtcgatggccgacagtctgtataatattcggcttctgagagaattctccaatgaatatcttaataaatgtttttatctcaccttggaagatatgctgtatgcgccattagtgttgaagccgaatgttatggtttttattgcggagcttttttggtggttcgagaatgtcaagccagattttgttcagccca

SEQ ID NO: 483880 - DNA, 1000 bp, Homo Sapiens
tttttttttttttttcaaattctttaagattattaattagagtttgcacattcctgagttaggtgaaaattatcttattccctgtgttttttgtttttttaaacttaaagagttagaaatgtgctgctccttctgcgtgaaacaaatgattccactctggagagaaatgaaacatgtttgaaaaatgggactatgggctttgaaagatggaaagatgggctttggatattttaacataaaaaacacctcagttagcaatgttttgtttattgtagggtatttaaacatttttcctttggaatatgcctaggttgacactgatgaggggctttaggctttctgatagttttcctgctgtatttccgaaatattttgaaactactttcatttttatttttaaaaattatacctaatgtgtgcatctgtgttatgcatgttgggactagttagcatgcacgttatgctttatcagcccattgtttttatctggaaacatgatgtttgagctgctaacctgattgtgtttgtcttttaaaaaatcagctctgtgttcttttcggtgaaatatattttgcatgtgtttggtgtggttttgtgtatgtttatttttgttttacatagggagaacctaaagaagtagttaaacctgtgcccattacatctcctgctgtgtccaaagtcacttccacaaacaacatggcctacaataaggcaccacggccttttggttctgtgttttcaccaaaagtcacatccatcccatcaccatcgtctgccttcaccccagcccatgcgaccacctcatcacatgcttccccttcacccgtggctgccgtcactcctcccctgttcgctgcatctggactgcatgctaatgccaatcttagtgctgaccagtctccatctgcactgagcgctggtaaaactgcagttaatgtcccacggcagcccacagtcaccagcgtgtgttccgagacttctcaggagctagcagagggac

SEQ ID NO: 483881 - DNA, 803 bp, Homo Sapiens
ttttttttttttttttttttttttttttttgctgtaacagtgtttattgatgatgagtccagggctcctgctgaagccctggtggggaggggcacagagcgagatggggcgtaatggaatgcttgaaggctgctccgtgatgtcggtcggagcttccagactaggcgagggcagggtgaggcctcgggcacacagccggcgcccagtcacccggcccagatggagggcggccgggccctgcacaggcacttgccaaggtggctcacactcacgcacactcgtactgagactcaaggccgtctccacaactccaaccagtgcaaatgacttagtgcaaattaaattcagaagggacgggggaaacagagtcgtggaggctttgaatctctcagaaaaaaggaaagacaggaaagctctgtgtttttctcagagtcttcatctacaaggggaagaaattgaattaactgctctctctcgttccttccagctcagaaatgtttactttatgataagcaatatttaagatgaactaaattcaatgatagtgaatttttgtcagttccagatttctcttgtattagaattttgtcaaatcaagagctcctttataagaaacctgttggtgaggcatgggaatcttttcacaccaaggtgttagacatagtggcatttaacctatagactttttttccctctccctcaatggggtagcttaaataccttcatccagcagatggtgctcttggacagcaaatttatttgaggctgtgggtttccaaatgaggtaaaacagtttaaacggt

SEQ ID NO: 483882 - DNA, 540 bp, Homo Sapiens
agtattacaaaaatttccatacaaaaactattttcatagaaatcttgcatttccacaaataaacctgaacattttttgaaaaaaaactgttcaagaattttgttcatttaacattgtgactgtattgataaacgcagtccacttccaagttctctcacagatttttctatagatgaccagtcccctttctcgtatcactgaaatctgcccatgctccatcaagttcatttacagcaggaacaagggtttggattgctatgtctgaatgttagaatgaaagctttagtcttccacacagccaatactcggccagtttttacaacttgaacattgcaaaacattatccttttaattcagaatcactgaaccaactgcttttattattattattattattattattattattattattattatttgggatatgggggttagagaaaaggtgttgggggaataggaagggatctggtagaattgcatgttaaatcttctgccttagggaacttaagaaaacattatttccttgataattggcat

SEQ ID NO: 483883 - DNA, 1000 bp, Homo Sapiens
  misc_feature (808)..(808): n is a, c, g, or t
cggggcacgggccgacgctgcaggctgaccaggggcaggccccggagcgccagagagcgaccacgaccacagttcggctgcccctcccgcccgtcgggccgtcgtcctgggccgggccgcctcacctcgcgcgggcggcgggctcttcggcgtctcggcggctctgccggccatctccgggcaatggcagcggccgccgccgccgccgccgccgccattctcgggcgttagcgtcgtggcgtcatcacagcgcgcagctgacgccaaaacaagcctacggggcgggtcgggggcgggtcgggggcggactctcccgaaactgggctacgcggctggcggatctccgagcgtggcctgccaatcaacctcttcggggcggggacgggcactctcctgaaggggtgggtctatttgtcgctcaaagtaacttgaccgctgcctgcgagacgggtcggtgatagaaaaaggaaggatcgcgggaaatagggagaaagtttcaagtttctggttgggggaaaggggactctgtaatgcgagcttgggtaaacaatgctttccaacagaggtttctggaagtgcctctggaactccgcaaaggatagacttaattttcattaacaaaatctattttttaaaactgcacttagaataatttcaacactccatgtgttgaatttggcctccatcaaagaagagatgcaaagggttaatttgtagataggtgaagtcaatcttgggccaacttctggactcatggttatttgttgttgttaatttaatttatatgccgagtctgaaaagcaagcgnatttttaaaaaattgttaccattcacaatgacttctctataggatcagaactggttcactttacagtcaacccaacttggaggggttaaaataggtgctgcagatggtaagtgcattgtaacctccatccatcttccccatttcagtagctctgtattcaaatctttattgagtatgtactttgcacatgga

SEQ ID NO: 483884 - DNA, 1000 bp, Homo Sapiens; identical to SEQ ID NO: 120184

SEQ ID NO: 483885 - DNA, 1000 bp, Homo Sapiens
ctgcaggtcaacggatcagaaagggggcaggaaccagatcaaagaaggtcttggagagctttggggagaaccttggtgctatggttcgaatgtccctgccacaactcatgttgaaataaaaaattcaattgctactgtcttaagagatgggactttttttctctttgagacagggtctcactcttgtcccccaggctggagtgcagtgggttgatcatggctcacagcagcctcaactgcctgggctcaagcagtcctctgccttggcctcctgagcagctggaactacagatgtgtgccaccacacctggctaattaaaaaaaaaattttttttttcatacagacaggatcttgctgtgttgcctgggctggtttccaactcctgaactcaagcagtcctcccacttcagcctcccaaagtgttgggattacaggcctgagccactgcactgggcagggtggggcctttaagaggtaattaggtcagctgggcgaggtggctcactcctgtaatctcagcactttgggaagccaaagtggtggatctcaggtggatcacctgagatcaggagtttgcgaccagcccaaccaacgtggtgaaaccccgtctctactaaaagtacaaaaattagcggggtgtggtggcatgcgcctaaaatcccagcttctcaagaggccgaggcaggagaaaaaaaaaaaagataattagatcatgagggctctgccctcttgaatagataaatactgttatcatgggagtggctcctgatggatggacgacatttggcccaatttcgtgtctctcatttgcttccaccttctgcccttccatcctgggacagccctttgccagatactgcatgaggttcttgcactttccagcccctaaaactgtgaagctctgagcaaaataaactttgcttcttttgttttgttttaagacagagtctcactgtcacccaggttggagtgcaacgcatgatctcggctcactgcaac

SEQ ID NO: 483886 - DNA, 1000 bp, Homo Sapiens; identical to SEQ ID NO: 310093

SEQ ID NO: 483887 - DNA, 1000 bp, Homo Sapiens; identical to SEQ ID NO: 310096

SEQ ID NO: 483888 - DNA, 1000 bp, Homo Sapiens
tccagggaaccgtgtgaaggactgaatcatgtagaatcgatgcatgtatactatagcagtgttgatagtcaattgtgagacgttaagacgctgccccatgtcctgaagcagattggccgcctgctggcgataagaaagttctttatctgggtccacgccaaaacgacgggatgggctattttccagctgttctcgagtgaaataccaccgtttgttgttgttcttcctctctccctccatagtgcttcaaccagaaggcagcggcgaaggttgcaggcacttcccagcgtcacctaagaggcgacccacatccgctgtgcgggggcaactgcgacttgacgaacttccgctaagcgtcgaccgccgggttgttacttgcctccgtagaggaagcaaaagtcaaaggacctacttccggaatgcacctcgctacaccccgtagccgagttaacagccaatatgcgaccagaaaaaaccttgaggcgaggacgcaggcgcgtcacgtgaccgttgggcggtggagtggggttagaagttctttcttaaaaaccgtgtatcttcccgcgagaaccggattgagcgttggcgccccgggtcaggctgcgaggccgcaattgtagtgggatggggcggccgcccacgcgccgcttggcggttcttacgagaactttgtttgtgacggcagtggtgatgtaaaatggggcaaatgggccgggcgcggtggttcacgcctgtaatcccagcactttgggagcccgaagcgggcggatcacgaggtcaggagttcgagaccagcctggccaatatggtgaaacccccgtctctactaaaaatacaaaattagccggcgtggtgtcgcgcgcctgtagtcccagctactcgggaagctgaggcaggagaatcgcttgaacccgggaggcggagatcgcagtgagccgagatcacgccactgcaccccagcctccagcctgggtgagaaagcgagactccgtctcaaaaa

SEQ ID NO: 483889 - DNA, 1000 bp, Homo Sapiens
  misc_feature (16)..(16): n is a, c, g, or t
  misc_feature (47)..(47): n is a, c, g, or t
  misc_feature (62)..(62): n is a, c, g, or t
  misc_feature (70)..(70): n is a, c, g, or t
  misc_feature (96)..(96): n is a, c, g, or t
  misc_feature (118)..(118): n is a, c, g, or t
  misc_feature (153)..(153): n is a, c, g, or t
actaaaaatccaaaantagccagcgtggtgcaggtccctgtatcccnagttacttggggttncaaaaatnagcggggctaaggcagaagaatcgcntgaacccagtaggtgaatgttnccgtgagccaagattgtgccactgcactccaaccngggcaacaggagtgaaactctgtctcaataaataaataaataaataaataaatacatacataaacctcaactgacaaggcacctttgctaaatccaaagtatcctttatttcattaaacactgtgtccctggcaatcaatttaaatttgatttcaaggctcacctcttgggcaggttactttaacagctataagcctcagtatccttttggtaaaaaacacttttggttgtgagctgaaatgaaaatggaggcacagtccctggccgcattacaagccccaaaagctccatgaggtgctggaaaggagaggcagcatcctccaacatacctcctctttgttcccttctgggtcctcaacaaacaccatcacgtctccttgcccggcgctgatggtgtccacagtgaacttggctggctgcttcaccatgtttccagtgggctcgattcctgcccaggtttacacagacatgttagaagccaggcgagggtgtgtcatgagccatagcccactgcatctctttcagggaactgagagatgggacccagccctgcagatcccatgtgggaaatggggacaaactgccttgacaaggaaaatcaggcaggtcgaaagccttaattttgcccatgttattgaagtaatatccaattttgatattcagagaacctcagtcaggagtctatataaaattgtggaaataatgtggttaataagtagtagcagagcttgccttgatggaagcaacacagcagggaggagcgaagcttatttctcattaaacagcatttattgtattgcctgacatttttaaaaattatattcaatcatttttttaattaaccttt

SEQ ID NO: 483890 - DNA, 404 bp, Homo Sapiens
ctgcagatctatttcgctgatttatttacattattctgcatgtccttggagagatggcagaaggttaagggacagcatcgattctttcagattcctcaaggctcttgcagatttcccatggtcctttgtactacaaagtgggagaatcaagcatcagatgaccttttcaatgttactctgttggttcaatctgtaacaactttttctcttgtcttcaccaacctctcactgctttccacaaaaaatgaaccatggcctgctattatttgttttcaattctgaatataataagatatcataaattgctttcacgaaagtactgatttgattatcacttatgatacaaattatgaaactgcaacatgagtgttttctctctgattcctttcaccatttcactgcag

SEQ ID NO: 483891 - DNA, 1000 bp, Homo Sapiens
tatttttatttatatcccatgacttattttttaatcccgtaacttctttttcataatactttttttaaagcttttcataaaacttttacgttttttccacaactttttttgccacaacctttccacaacattttttatcctgtaactttttcatcccacaaccttttttatcccataactttggtttgtgttcttcaaataaacacacttcatggttacattaaaattttataaaaataaaaaccgattatctcatgccaagcgtgcccagcatttgcacagtctcaatacctttaacaccacagttttcaagacacacaaaattttaaggcaaaaactttgcaacaatttaataatttattacattacagtagcatcacagtagcagtgaataatgccactttaggcaacagtgtttcagtatttccattatacattctgtttacaagaattcataaattggtaaaagtcattctaagaaaacttggcaaataaagctttgcattggaattggcatttctttctctacttttccttcccccagtttctttcttttaaactacagtattcatattttaaaatgtcttaacttattttaaaacttaagatagcagttacatttttgaatagttatattcttttaaaatgactctttaagataaagttttagagaaactattatggataggactgatttacattttcacattttctaaatatcagctttggttttagaactgactttttttcatttctggaaaacctatcagatttaatcaaatactttaaaaatgattatatattgcaatctttaaatcggtttttaattctttacttcctacagaaattcaaatttattcagttgaacccacactttaaaattctatgtttctgattaaactctacccttctaatgttgccttctaagcaaattgaacgctgccttatactgaatgaggaagagaacaaatacttggctgaatgaggtattgcaaaggac

SEQ ID NO: 483892 - DNA, 1000 bp, Homo Sapiens
tttttcgggcccaaactcgtgttatattatcgaggtggaaaacagccatatgtattaggaggggaaactgaggcagaccacaggacggggctccagagggaggacaactaggcccagaaccccttctggaggctcagagatgccagtgttccaggaggtctcacagcatgaaaggggcctgactacattcgcttttagcagtcggaatggcggatggtcaggcggtggctggaatcacatttacatccttcaaatcagcatcctgggcctcccctggggtgggcaggaggaccccggtgtcgtctccacgaagggagatccatggggctgaggagagagagagagggagaggtcatcagaatctctgaggcgctctgggtctgactggcgtcccccatttgtgtgtgtgtctcacacactcttcctcagtctctatccccttccttctgggcctttgtctccccttctcccaattttccgtcccccctctttctacatctttgctccctcctctgggtctgtctccccctccctctgtccgcacctctctctgtcccctctgggtctctgttcccccgtctctgggtctctgtctccgtccccctctctctgcacctctgttctcccatctctgggtttctgtctccacctctctctgatctctgtcccccctctctgggtctctgtcctcccaggtctgtgtgcccctctcttggggtctctgtccctctctcagaggctcttcctcccgctgccccccacctggcagcccactcctcatccttctccacaacagagctcctcctacagccgctgccgtgagtagcaagacaccgatgacgattcccaccacgagcacggaggacttggctggagattctgcagccagagaacgctgtgagatgtggagcagcccctccaccccacccagtcaggacacagaactggggcgctcccagtccctcccagcctcggagattccagcaccaagtgtctgatg

SEQ ID NO: 483893 - DNA, 1000 bp, Homo Sapiens
aaatggcttacagtttttcacatcttcaatgtgatctacagttgcacatgatcagagggagggcttaagaagaaaataaggcagaatctgaccctagcacacatccttttcatttggtgattcacttttggtaaaaaatcttaaataatatgtagacagaggatgagaggaagataaaaggaagaaacatatgacagtgaaaatgagagagaaagagaagaggaaggagagagggagggagagagaaaagaggaaggagagatgggggagagagagaggagagaagaggagaaaagtgagaaaagacaggggaaaacagaagagagagggaaagaaagcaggaagagagaaagagggaggtgctctcaccagaaggttggggtggccgagcccactcaatgaaaggatggcggtgttggatgatggctcgctggcacttctccacgtccccattctgttcaatcatatccacaatttcctgaatccacgttgtccctgaggctcagaaaggaaggatgagaagcagaaatctgttagacaatcttccctgaagagtcccgagtaaacgaagaggatgtagagccttggtgtttgcatcaccctccccttgggtcagaatcctgtttgccatgagtgatagaagtccatgagggatggactttggatctctgtagggagtggagcagcacaggcaagggtctctccacccaagaccagtgcatggtagagcatagcagctttcctggaaaactcggatatcaggcatcctgtgtgagccctgagctccaaaacccattgtggaacaataagaaggagcaggtttcctaagaaggggaattctaacttaagtgatgagcctgtgctggctcagcaggtctttgctgtccctcctaccctgcaatcacctgctttagggtaggtgcagatgaggagatcatctggtttggcctcgaagctctggatctggctccagttgtccacagttgcaggctgcaggagg

SEQ ID NO: 483894 - DNA, 1000 bp, Homo Sapiens
  misc_feature (481)..(481): n is a, c, g, or t
  misc_feature (594)..(594): n is a, c, g, or t
  misc_feature (610)..(610): n is a, c, g, or t
ctacttggaggcttagggctttaagttattcatctgatctcctcaatgtacaaactgagtggctggcacacaaatgtctgggggaacgaatgtatgacttggaatagtcaaaatcacagagacagactgtataatagtggttgccaggcattgtggggaggaagaaatgggacattattgtttaatgggtatacagcttcagtcttacaagatgaagacagttctgaagatggatggcggtgatggatttataacattatgaatgtgtttaatatcactaaactagacatttaaatatagttaggatggtaaatgttatgtgtattttaccacaatcaaaaaaataataatttgtttaaaatgaacatctgacaatttttatgaaagagatcatccggtatgcatttgctttgcatgaacaaatactgccctcttctgggctggtatattgccacaccaagaccatgtgagaaaccagttntctagggaatgagataaagctaatacgtgaaccaattttaacacaatgctggtggttgcaactatgtaacactaccaggtaggcataacatgacaaaggagagactagacacntcaactcagccttaanaattagcattcaagcaattaacaggagtgatttcaaaaagaatttaatgtagaaataatttttaccagatgtgtaacattagtcaaatgaatataaaaaataccatttggacctctttcaaatggcctgatcattttgaactggcaatattttcagtctccttttaaatgctgcttatagtataggcaaaaagatgcctgaagagaaaatggttttgggaaacttaccaatgtcataggccatgaaatctgaagagaagcatttggcgccatggctcatagatgtgtcattgtgtgtgtttcctccaaacaccagcatggttccactcactatcacagctgtgtgcaagtaacggaaaaatcggctgtccttaagaatggtccttttgag

SEQ ID NO: 483895 - DNA, 1000 bp, Homo Sapiens
  misc_feature (18)..(18): n is a, c, g, or t
  misc_feature (21)..(21): n is a, c, g, or t
  misc_feature (41)..(41): n is a, c, g, or t
  misc_feature (64)..(64): n is a, c, g, or t
  misc_feature (67)..(67): n is a, c, g, or t
  misc_feature (93)..(93): n is a, c, g, or t
aaaacaaactaagtttgnagnagcctcttcaggtcctcttnactaaggcctggccaagtacctnccncttccccaaaagaaggaccgttttgngttcctccttcttcaatgacctcatcctctggaagagactgctagcactgggaatctgcactctgcactgaaatacatgactctgacccattctgagggcaggagccaaataaaaggggcaggacacacaggaggcccccaaacaaggccttgccaatgggagtaacttcctcaaaacttcaaggccgaggaaaacactggccacggctgagacctgtcagcacacctgagatttagcagtttggagacaacctagaggacattcaggagcctgtgaggagagcgcaaagtggagggataacagcaccactggagacagtggtgtggttagtggagcagtgagacggctgtccatacctcactgctcagatctgtccctgcccccacgggcccagctgccctgtaggcacacaaaggctgtgtggaaggtctgtggctcacaagctgcctggagggctgtctgaggtacctgccaggggttttcaccctcacctccgttaactgtcaagtgctccctctgacgcagtctgaaaactggtaaacgcttttttttttcccttaaggttctaatgaccaaaatgtaaatataggcaaaacaatgcaaaatcaaaatgaaacactcagaacaaaagccacatttttaccagatctacttttatttcagaaggaagtttgtattatagtatttacttttgtttatatacaagttcttcacatttgtgtttaaaatgcacagacctcccttagttctcttgttcctgcttaaattagctgttattttacaatacaaaaaataccaaaaaattgcagtcctaaatgtatgtataacacccacaatccccgcaatgaaatagtttacaatacttactccatatttacatgagtgtaatagatgctaaattataca

SEQ ID NO: 483896 - DNA, 1000 bp, Homo Sapiens
aatttataaaggaaagaggtttaatggactcacagtttcacatggcgggggaggcttcacagtcatggcagaaggcaaaggaagagcaaagccacatcttacatgacacaggcaaaagggcatgtgcagggaaactcccctttataaaaccatcagatctcatgagacttactatcacgagaacagcatgggaagacccgcccccatgattcaattacctcccactgggtccttcccacgacacgtggggattattacaattcaaggtgagatttgtgtcgtgacgcagccaaaccatatcaccaagatacaagttggcttgggctatggatataaaatgaactacactcagatacagcgctggatgggaggtcaacctgctcccctccaccccccaccccccccatcctaaatcaatgtaggaagaagtggcctccagggaaagacctgaggcctagttcctgacaaagcacttcctctcctctgagatttctctagaatggccacctttgtgagctggctgacccttctcaggaatttgcctgtgtggccttccctatggggtccgggcagatggcaggtgtggcaggaaaccccccagccccacagtatggactgttctgcagcaactatgatgcctgcctcccactctgctctgttcacaggaacagccccaagcaccaccaaacatgcccctggagtcacggcctcaacctccacctctgcatccagaagtgcctgccgtgccacagggaacccctggcaacctcacaggctcaggcgagctcagtggagccagggagcagaactggccctgaccagccgctacgacaggagagctcctccaccttgcccctcgggggtttccagacccaccccactctcctctgggaactgaccctcaatgggggtcccctcgtcaggagcaagcccagcgagcctccccctggagacaggacctctcaattgcagagctgatgtcagtaaatcgtggccatag

SEQ ID NO: 483897 - DNA, 1000 bp, Homo Sapiens
aaggacacgcgctttatttcggaagtgataattccagctccaggtgggtgaaccccggagacctagtgtccccccccaactccattctcacctataccagctcgggacagtccctgctcgcgcccagcccacctagaaacagtcccttcttgctgagttccaagtgtgcaggcgaaagagatggggctgttcttcagatttctcttcccagctttcagcccccgagctgcccacagcgttcaccctccacatcccggccgccctctgggcatgcgggtgaagagtgcggcgcgacgctgacctctagtggtcggccttggtagtgcagggcagacggccgaggctgagccgcgggccgtgcggggacaggccacttgttcccatcccgctttcctcgccccactcctcgtttacccgcacccctctgctccttggttgaggctcaaggattgagcctgacaacccaggcgtctttgggtagttgccttcccgggactaggaaccctaggaatgggtggcggggtggggcggggacagttctgtctctccgctcaccctgtcccgccgccgccctcatagggccaggcacgcagttaatgtctgccatccatctattcgtcaaatatttgcggcacacctgcctagccagagagaaaaggacacgacacgacccgccccccggggctcgcaagccagtcctggggcctgaccgtgcgggaaccgcggcaaacactgggctgcgaaagcgcaaaggagaccgaacccattgggggcggagggggaggagggccaggcaagtccctggaggagacaatgctctgaaagacgagcagaagttagctgggtggagaagcggagagcggcgctccggtcgcggggctcagcctccgcagaggctccgcggctgagggcgagcaggagaaggtaaggccacgcccccctgttgtgattggccaaccggggtccgacgtgtgggcccgctggctgacatgataggttt

SEQ ID NO: 483898 - DNA, 1000 bp, Homo Sapiens
tttgttattaattttatttacaatagtatttaaaggtaactttgtaaaataacccctaatgatataatctaaaataaaatagattgtatttaaatcacttttttattatataccacgaaaaactactgaatgattaaaacattcttaagtgggttcttaacattgtatggaactggaaagagcagttcagatcacagaggcatgggcactgtgttctaagtggtcactgcactgattcagaacagcaggggctggctctgtactgggtgggtgggtgctcaaggccagacctacacagtgctcctgtgtctgcagctgcagggaagcaggagaaacagtgacgatggtccaggagaggccacctgacatatggcagaaaaacaaaattcagggtacagacagtggctgggagcatcaactcaatcgctttctttctttactattttccctctttctaaaaaagtctgtgatttagatcagtggctgcaggagggagacaagagacccagtaaagatgttttcaaagatgatgcctatctggtgtgaaaagaaatgaagacctacccaaagagaataagcacaagctattatgcagagcttgctacagcaagggagtcagacaccatcatttgcaatttggcagagactcaaaggtgggcagacgagtgggagagctttatagtggaaaaaggcgaaggcttcaggtgtgccctgattggaggttatcaatgcggggaagctggaggcggctcactagaagcgaacatcctgtgtgcttggtcaggggaccatatttggctttctctggtgggtcctaagttggaatcggggacaaaaattagggaagccatcagttattaatccagtcctgaacattttgagtcaattgttacagaagttattatttagcttcctggatagttactagagagcaatttggcttccagcaggtctgatttagagcaggccagcttccggggttgctttttgtgggtaaggg

SEQ ID NO: 483899 - DNA, 1000 bp, Homo Sapiens
gactcttctgcacgcaaaccctgaagcaggtaacttttttaaaagctgacaattttaccatatgagattttaaagacagaacgcgccccagcaaaaactgagctccctaaactcactgcggcaggacccccttcagaagagctcctttcccccggcccaggcccgcgccccatgaacactcaccggaggccatggctccgctccccgcaccttcccgcaggcagctcccagcgtcctggccggaggcggccgcagtcagtcagtcaggaggccgagggacctctgccggcggggcccccagtcccccgaccaccctagaggcctcctccttcttcccgccctccgctgggtttgcggctcacaccttcccaacccctgaattcttgcaccccgggtcacccagcgtcgccgtccaccgtacgggagccaggggcagggggcggacgggggagagccgagtgctggcccagccgagagcggagcagcctggcgggaggggaatttcccgcggctgacgtaggcccgacgcagcaaccctcacccggaggcgtgggcgggcgacctcgcggccgccgcgcgcgcgaccgcccccagcgccccgcccctgcctgtcccgcgcacgctccccgccggcccccacgcatacgcccccggcgctgctgcggcggctggcttgggagggggtcgagggagcgggagcttggggtgggcttcgggagcgcagggaacggcgggagccgggaggtgacggctagcagcgtgagaaggccgctggctcctgagaaatccccctcctccaggttgttcttccgagtgtggtttaaagttcaggagcgggcgggagggtgcggatgacgtagagagggccggccgctggggagcttttgggggcgcgcggggccgactctcccggcctgggagggcgacgaccggggttttcgagaggtggttccccctcttcccgacttcgcacatacaaatctccacccccgcgccagcg

SEQ ID NO: 483900 - DNA, 1000 bp, Homo Sapiens
cacacacacatacatatacacaactatacatatacatatatatatatgatatgagcagcccattcagaagcagaactaaaaaaggtccttaaagcctcaggaaagatgtttaagctcactcttaacagagaactgcatggcctagcgaatgacaaaaacccaaacgggctttcccacctcctccttggcaaggctagggaaatagggggtggggagagatgggaaaccaagctccaaggaggaagggggctcaggtaccatctacgccatcgcccatgctcagtggtgtcacttctcagaatctatgccaaagatacgcacgactaatgcacaaggatttttactatgccattatttatggtaacaaaaagatgggaaacaacccaaatgtccatcaatagtgactggttaaatacacatcggtctggctgcaaaatggaatagcatgcagcccaaaaggagagcacccgtgtgcatggtaagagggcagcactcccagggcacagcagcgggcgggtcggtgtccggtgggaggaagagctgccacccagctctgccaggggaagcagttctccctgagagccccaggccccattcttgacttccccagtgccgggtggaggaagagggagggattagcccgaggcaagtggttcgagcagacagaagggaacaaaaagagcagcgagtcaggcctgatcggggccgcatctaccccaaaagaggggaccagcggatcaacagctgaagcgtaaggtgccgcggccagctcctgggtggggctccaggtggcatcccagttgtggccacccagcccttcatcctgggctaggcaggcgggagaggaaagcgcagactgcacggtcccgggcacgtcctcggcaggcagtggccttgcactggccggccctactcaatgcactccatgacatgtatctgcagggtgtccatatcaggggcctgatactggcacttgggacagcagaagtcaggtggctcc

SEQ ID NO: 483901 - DNA, 1000 bp, Homo Sapiens
ctgtatcaagaagcttttggactggaagagtgtttttcagcaggaattgtggtattggccacccatcaccccatttaattaaaaatccctggcctcaggacctacagcaatgtactgaagaacttcagaacctcaattagccatttgccatcttgagagagtcttgtccatggttcaagtgttcccttggaactcctgaagggcttggagcttagtctgagccatgggaaatggccaaagagtctcaagattcccactgtatcctgtgccttggaggcgcgtaatacgactcactataggcgaattggtaccggccccccctcgaggtcgacgtatcgataagcttgattgtgccctcgagcaggcaaggagaccatggcagccctggccccggtcagttcttggctttggcagttccgggaccaggacgctggtacagccggattatcccttcatcgtgtagccgcttccagacttctctctccagcttgaagtcatggtttatgtaaaagatcagccgcttccatgatgtatcatagtagtgatcagaaaagcgctcatggccctcagtgatgaagccataagcactcacctacatcacggttggaggagaaacacggcctgtagttgctgttgcccaggcttcttctcatggctaattctgtgttgaggggtgggggttcttttccctggctccgtcctaggggtctgggtgcaggtccctggatacgcacgcataactgcatgcacccatactcatgcccaccctctttcccagcagatgtggcacccagcccatgcactgtcctatgctgaacaggcccaggaatagcccaggagctgtttctccaggtatttctgcagctgcagtggagccttacctggtcacagagctgaagggcagtgagcagcaggagggccccagtggtggggtatatcctccagtgggcaccatccagggtcttagactcagaaacctgtgaaatgccccaaaccccca

SEQ ID NO: 483902 - DNA, 1000 bp, Homo Sapiens; identical to SEQ ID NO: 310100

SEQ ID NO: 483903 - DNA, 1000 bp, Homo Sapiens
catggcagtgcctacagtctcgagtctgccagtgacaaaccctccttgcgtcctcaagctccagccagagagccaagtgacagcagcccttgttttgttttatggctagtcttatctggcctggttatttccttgcggggaggagagggtttgctaatctgctcccagcccaacctattaccaccccacctcgctgggacctactgctcgggaggcagcagacagggagccaccagcagtggcttcctggccctgtgctgggggtggggggaagctgggggcacatgtggcccttgccttctgagcagctcccagtgccagggctttgagactttcccacatgataaaagaaaagggaggtacagaagttccaattccctttttattttgctggttggtatctgtaaatgtttaataaatatctgagcatgtatctatcaacgccaagaatttcaaagtctccttcaacaatatgaggcttttaggatgtttatattccttcatccctcttgtttcccaggttttgcagggaaaaaaagtctggaattatagatacagcttattattaaatttgttcttgcataatgtctcttctattacaaaaattctttcttcataaactgcattagaggtttgcaacaaccacatcatttccattaacttagatttaggttttactggattcattgctcaccattattgcttgtatattacatcttttccaatctttatattctggtctaatttttgtttgagtgtcttcgtctactaatggtttcaaaaatggaataaggtcatgaggatttctgaatcctcacctgtccaaattgtcattcacattttatagaagaggaaactggctcagaaagcacaagtgacttccccaagatcacacagaaaataaatgatggagccaaggttggatgtgtagaccttgtgggaactgaaggttttataatttgaggagccctctttaagaaaaatatacaaaattatgaat

SEQ ID NO: 483904 - DNA, 1000 bp, Homo Sapiens; identical to SEQ ID NO: 310101

SEQ ID NO: 483905 - DNA, 1000 bp, Homo Sapiens
ttttttttttttttttttttttttttttttttagacagggtgcatctgggaggctgccgggcctttattcaacactagatacgccccatctccaattctaatggacatgtgcagaaaatgtgatacagaaacctgcagagcggccagttcccagcggacgtcagagatcagctcttacctcaaggatcttgctcaccaaactctctttgcttatcaaacctttctttcagagggcaaaggttaactcccatctagaagaggttgaagtactatggttttcaaaccaggaacgtggcactaatgaggcggagctctggagaggcacagctgcagaaggttccagggacccttggaagcagacagggaccaattcgttcccaaagagcgcggtacgcgcagagctggggaaaggtgttggatccggcgccagtccttggacgatcagtcgtcgaaaaggaggcaggggccggcggctccggcagccttggggaggggaggcgaggcggcgtgctccggccattttcagcacgggtagagttaagtttaatctgtaacctggaggggaatctgctctgatgacccagcacaaaaacggcagcaatctggtaacgcaccttcggaagggaaggcgtgctctcctcgccagtcctggggggaaagacttaaatggtcttccttccaggacctattccgtaggaaaggcgtcgcggcgcccaagacttagttctgccgggctgcagcgcagactgtggttggatgcttttgtggtcttccctaaaggacttaggtttttcagagtctggtagccagtcacttccacttgtgcaggctcagcatccctggggcctcaactccttatccatcctgggctgctcctcgcagtaagccctctccttgggatcctggccctctacctcccagccctggaaatcttcttgctcctcaccttgcccggcagtggcaccccgttggctgggttagcctgccgccatcaacacac

SEQ ID NO: 483906 - DNA, 1000 bp, Homo Sapiens
  misc_feature (78)..(78): n is a, c, g, or t
  misc_feature (84)..(84): n is a, c, g, or t
cagcccgtggctggaggcgtgacctcaaccccaccaaatgcccaaagtccattttatagatgaggaaacttagggccnagagtnctgtcaccccaaatcacactgcacacagggtgccctgaaatccacttttattcatgtaaaaaaaatccccaaagaatagagaaaaaaatgtgactcctacttcccggagctccaagtctccagccagctctcccggggaagggaggagacgctgctagctcgagggtgtgggtgtcacagggagcaaagccctgaccaaggccctaacctaagactgagggcaggaaggaggggccccaggaggatgaagggagttagctgaggtacttgccccgggtttaaaaaaataaaatttctagataaaaagttaaaaaaaaaaaaaaaaagcattagtgtcattgcctcctgccctccacccagcgcccgccctggccctgtggccacctcgctcagccagttcagagctgcgtgttctcctcctggctctccgagtcagcgcccgacaggtgcccgctgctcccgggtgcgtgaccgttgctggcacaggccaccagaggcccgtcccccagcccctccggcatctcgcccagcaggctccggcggatctcctgggggagcctcgcccgctgctcctgacactcctgggccagctgggccagcagctgtgggagaaggatgggcatcacaggcgaggcctggctgccttgcacaccgtctgcccacctgttcgcccatggcctcaccttgggctcctcttctgccagctgttgcaggacctgctgctgcccagccacaagacggtcatgccgctgcttctgggcctcctccagctacaggcgtgggcaagggctcagctgaggggccctgagggaggggctagagcctcgaggctctggctgggtatagaagtcaggtgggcgaggccgggtgcagtggctcacatctataatcccagcactttgggaggccaaggcgg

SEQ ID NO: 483907 - DNA, 1000 bp, Homo Sapiens; identical to SEQ ID NO: 310103

SEQ ID NO: 483908 - DNA, 1000 bp, Homo Sapiens
  misc_feature (28)..(28): n is a, c, g, or t
  misc_feature (99)..(99): n is a, c, g, or t
gaaattatattaaggctaaatattgggntttaataagtccttactaatacatgtatccgggttggaatgatccagttagtcctgaatgaagcaagcacnaattatccaacccatttctactcagattatactttaataccaattcttttatttaaattttattaacttaagagcttcttcttaataaaacaatagataaacatttacctatttcatgaaagccaaatataacaccaggccacacagtaatttctagatgttcccatggatcaggagtgagtagagccaagcctacaaaaaatgtctggactgagggaagaagtatcctaacgtcctcataagaagcttcctgattgtttctcacaattgtcaggacactgctaggacacaggttggtagttaagccctggagtcacgctacaactaattacatttctatgtatttctagttctatatatttgtatatgtttctagttgtatattctatatatttctagttgtagagtggagtcactctaccactaattatatttcttattatgacacagctgtaactcgtagctcctaggtacctctttaagttacgttttggttgttgttgtttaaaactgttgaggtaagaagcaatcagagttagtgagggaggagaagacaaatataaagtctcaagtagagaaggtgttgaatattataagttttttttcttgataggcaacagatttttcatatccattaaaacttgcttacctgctgctaaagtttgtcctgctcccgaagcactggtcacacaaccaactgaattgcagagagtaatagtaaactcatatatcctataaggtttcagtccttctacagtgtaagatagttcttgggatttagcagtgtgcaacagcttcaaggcaaaaaagaaagaaagaaagaaagaaagataataggtaatcagtgtgaaaatataaccttggcagtcaaagttccatgaattcagacagagggaattat

SEQ ID NO: 483909 - DNA, 1000 bp, Homo Sapiens; identical to SEQ ID NO: 120186

SEQ ID NO: 483910 - DNA, 1000 bp, Homo Sapiens; identical to SEQ ID NO: 310106

SEQ ID NO: 483911 - DNA, 1000 bp, Homo Sapiens; identical to SEQ ID NO: 120187

SEQ ID NO: 483912 - DNA, 1000 bp, Homo Sapiens; identical to SEQ ID NO: 310108

SEQ ID NO: 483913 - DNA, 1000 bp, Homo Sapiens; identical to SEQ ID NO: 310109

SEQ ID NO: 483914 - DNA, 1000 bp, Homo Sapiens; identical to SEQ ID NO: 310110

SEQ ID NO: 483915 - DNA, 1000 bp, Homo Sapiens; identical to SEQ ID NO: 310111

SEQ ID NO: 483916 - DNA, 1000 bp, Homo Sapiens
tccctgcctcagcctcccaagtagctgcaattcccacattcagctctccaagattgtattttaatgtgagatatatagcagacacacttattgatggttgtgctgcagtgagctgccctcctgagacggctcagcacaactgcgatgggcagggaggcatgtgagagagcgccgcagacatgaatggagatgctggtgcatcgctatttatggcagcacacacacactttccaccctgtctttgcattactctgccatctgtacagcgatggcagtctgtgagcccaacgtgtacttactttataacttacagcatatttatttcagcatatttactctttaaaaatatttaaaccttcctgcttattatgattttttttaaactgtgcagatgactctgcttttgcatgttgcagcagtttggctgattttttttccctctctattccaagcacacattttatttcaaaaggtaagctttagagcagtgcttctcaacttcaatgcaatatgaatcacctggggatgctgtagaacttacaatttgacttgaatagttttgagtggcccctgagatctgtgttttttaacaggctccaggtgatgcagcaccatctgtccctgggccacactttgaggagcaatgctttacactgtctcaaaacttcgaaggcagtttaagagtcttacaaaagaagatccttgtggtcactgctagaaacatagactggacacttatggcaaattaattatagcctcagtcttcttaaattgagtcttggatgtgagcaaagtgaatgtataagataaaaatagtaaaatatataacttataaaagcccaaagaaaatggctttattttcaaaacaattgtaacaatattcaataatgtggtatgaaaaaagtgggttacaataatgaaacttttctgtttgttatacttggatatgagaaaaactactaactgttgactacaatttaatttttgtttctcataaatc

SEQ ID NO: 483917 - DNA, 933 bp, Homo Sapiens
ctcggcggcccggctcggacgcatccgccgcggtggcctggggattgggggcggccgagacaaaggccccagttcgggggccgggaggcgggggtgctttgcgaggctctgggaatgccagggtctcgtggcctgtggctccgagaaatgggaagacaagaggcccgaggcgggcctgctgtgcccaggtaaccaaatactccctctggttaaagtccctataaccagggtttccggtctctggcagggccaaggcgagccccaaaggtaggggccacagggcaaacggaccaagcgattcgggtgccaggcgggccgggccgggggcgggaagggccgggcccagggaaggtggaagtggaagaaactcaccgagcgaggcgcggtgggcggcgcccccgggcggacggggcctggagtagagctgggagcagggcgaggtgcgcggcaggcgggctcgcgggacctgggcgcggggtggcggcgctcaccagcagagcctgggcggcacgccgagcggccgcatggtgttcagcggaccgcttttgtccgcctggtgggcgacggggccctgctaggatggatgtggcggcaggcaatagacagacttgagcagcgagtcccggggcgacgctggcctcgctaccttcctggcgctcacgctgcctctctctcccccaccggccgcaacgcggctttttatttcgacatcactttgcgggggggcagggggtggcgacgggggcgggagcgccgcagggggcaggagggtacccggggctctgcacccggcctaccaggtccagccgcctggccggccaagggccgctaggcactcagggcgcgcacaccctgtgcatccacactccaggccgctcccaccctctccggagcgcacacgcgcgcccctgacctcagggatgcttgctcaga

SEQ ID NO: 483918 - DNA, 1000 bp, Homo Sapiens
gtcgacctgcaggtcaacggatcacgaagtcgagagattgagaccatcctgctagcatggtggaaccctgtctctaataaaaaaataaaaaagttagctgggcatggtggcacgtgtctgtagtcccagctactcgggaggctgaggcagaattgcttgaacctgggaggcagaggttgcagcgagctgagatcgcgccattgcactccagcctaggtgacagaccgagactccgtctcaaaaaaaagaaaaaaagtctaataattggtagtctcattatgatataacttaaggaaggagtaggaaaaaaggtatatacagtatgatatcatttacgtaattatgtatataatattctccacgccgaacaacagtggaagaaaataggccacatgcagtggctcatacctataatcccagcactttgggaggccaaagcgggaagatcacttaagcctaggaattcaagaccagcctgagcaacatggtgaagtctcatctctacaaaaagtaaaaaattaggtgaacatggtggcgtgcacctgtagtcccagctactgggaaggctgaagtgggaaggtcacttgaggctgtgatgtgttgtggtcatgccactgtactccagcctgggcagcagagtgagaccctgtctcaaaaagaaaaaaaaaaaaaaagattggaagaaaatcaatcaaaatgttagcagaggatatctctgagtggtagaagtatgcatgcatttgattttcttccatattcttttcttcattgaccaaatattttgtaatgagcatataatagttttaaaaccaggagaaaaggccaagtgcagtagctcatgcctgtaatcccagcactttgggaggctaaggtgggagaatcacttgaggtcaggagttgaagaccagcctggccaatatgatgaaaaccggtctctactaaaaatacgcaaattagccgggcatggtggcacacgcctgtagtcccagctactcaggag

SEQ ID NO: 483919 - DNA, 1000 bp, Homo Sapiens
aggcctattggcttgaagttttcattttttgttacatctctgccaggttttggtgttaggatgatgctggcctcataaaatgacttagggaggagtcccttttccacaattctttgaaataggtttagtagaaataataccaggtcttcttttttatgcctggcaccatttagctgtgaatctatctggtcctaggctttgtttgggtggtaggctatttattacagcttcaattttagaacttgttattggtctgttcagcaattcaatttcttctgggtttagtctttggagggtatataattccaggaaccatttattctacattttgtagttcttgtgcatagaggtgttcataatattctctgatggttgtttttatttctgtcaagtctgtgctaatctcctccttgtcatttctgattgtgtttatttgaatcttctctcttttttctttattattgtagctagaattctattttgttaatttgtttcaaaaaaatacccagattcttgattcatttttcgtttgaatgttttttattgtgtctgtatctctttcagttcatctctgattttcattatttcttgcttctgctagctttggaattttttttgctcttggttctctgttcttttagttgtgattttcaggttgttaatttgagatttttctagctttccaatgcgggcatttagtcctatacattttcctcttaacactgcttgggtttatcctagagattttggcatgttgtatctttgttctcattagtttcaaagatcttcttgatttctgtcttaatttcattatttgcccaaaagtcattcaggagtagtcattatttgcccaaaagtcgttcaatgtaattgtatggttttgagtaaatttcttagtctggatttctaagttgattggactgtagtccaagagattatttgttacactttcaattctttcgtgttttctaaagagtgtttcacttctgattatgtaatc

SEQ ID NO: 483920 - DNA, 1000 bp, Homo Sapiens; identical to SEQ ID NO: 310112

SEQ ID NO: 483921 - DNA, 1000 bp, Homo Sapiens
ctgatgttttaattgaaattttaaccaaaagaggcacggccagatttctaatatgctctaactacagttcttccctttccacaattacacagctaatgtctgcctcgaattccctaatttctcattataaaacaatttgatttcatctcgcaggctctaattgcattgtttctcctgctagaataactgcacattcttcttggtaagatgttgaagttgttgaattacaaatccaataataggttcatgccattgagtttttcatgaagttattattccatctgtaagcgaaaatcaatgaggagcttgaagtatagtcgtaaaggcaatcttccttgctctagaaagtccttctaaacagtcccccacaatcgcaggcgaacaaaaaagacctggaaaaattaagtgagccaagctgagtccacccacatgtctcaagcaggactaatgaaaattattttcagaatgagagccttgggggaatattagctggtatgagaaaggggataagtgaacaaatatgcaattcaaacccaccgatgggactctgaggagaccacaatgacacgggcaggagctgagcggcacaaaacatcctggaggagctggacaaggtagaagtgccccagatgattcacttgaaaggtggtctccaggccatctttggtgagactccagggtagagcaaaagttgctgcgttgcacacaagcacatgaagaggcctgaaaaataaaatatcccatgtgatgtggacataaccactacaaccaaggataatccatgctccttcgggaatccacgtgatgtggaacataaacactacaaccaaggataatccatgctccttcgggaatgagaaattctttctccgtcttctagattcccaccatgtagaaataggataccctagaatgtcacaaggctttgagtgggcaactgtcctccgttgctgaggatgagaggcttattaggatacggaactttcagtgtgaaaaccag

SEQ ID NO: 483922 - DNA, 1000 bp, Homo Sapiens; identical to SEQ ID NO: 120189
  misc_feature (352)..(352): n is a, c, g, or t

SEQ ID NO: 483923 - DNA, 781 bp, Homo Sapiens
  misc_feature (670)..(670): n is a, c, g, or t
aattttggtattttttttttagtagagacggggggttcaccatgtgtccaggctgttctgaactcctgacctcaggtgatgtgcctgcctcagctcccaaagtgctgggattatagctgtgagccaccatgcttggccgacatcctaaatctcttaaaagagcagagtccttaattacataagacaaataacaacaacaacttcaatggagcagtcccaaaggaaagtaatggccatgtacttaacatttaattcaaactaaattataaataattgatactggattctttcctgttacacagaagtcagggcagagtagaaccactgaaccactgaaatgggagtggtatttccaaaaagaaggcaaatggtctccaaataaaaatgtttataaaataaaacttagtagctttttttctgctggtgggacatgtgagaaaaaaggtgcagattcagagtttgactcagaacatctgctgtacttacagtcaggaacttgtatccaagcacagagaccattcctgcaatgctcccaataatcatagaaccaaatgggtgaattgccatatccgcacaagtgcccacagcaactcctccagcaagggtggcattctgaatgtgaacctgtgtgagcggcagaaacataaatgaggtgagctggatgatgganaattcagaaggatcagaggattctagagttcaagagacccacatcacattcttcagttgaaagggcatttggttcttttttaaaaagaggtttgtttggatttatagaagg

SEQ ID NO: 483924 - DNA, 1000 bp, Homo Sapiens
gatctgccagccattggcaccctgtgaaagttgtgtggctgtgaggtcaagctcacctgttccccctgactgactcgggccctgggagttgttgctgttctcattgggtgactcaattctgctgcaagttgctgccagcagagccaaaggggatggctgggactcctggccgaaaataagggggaggaaaggagttagagacacccagctgccagcctagggggcagtatacaacaaataaacagcaacgtagtgcagacaaggagcaaaaaacagaaacaaaaagctgacctatctgtattgctgaaactcctttgtctttggggatctccattctcttacttccttatctataaaatggtttagtctctccctaaaaaggctttctgtgaagagtaaggcaattatctaagaatatttacatcttctcaacaccttccccactctatgattatcacttacctgccctcctcctccagtgctgctgctactgcctgtgctgctacttcgagcctgtgaaaaggcaccaccaccattaccattgcccccattattgccaccaactcctttttcaattttcaccacagctgtcatttcatccatggagtgatcttggtctaaaataattaaaaaacaaacaacgtaaacttgagggaagaaaagaaatgaagtaggaaggataaaaggaggctatgatgaaatagcaatgactaacaggaaggcgaaagcaccagtataaagaaaatggattggagggcagaggggagctgcagggcatgcaggacatgaactaggttcaatgtgccaaaagtgggccttaattctcccttgtacaaaattaaactaagaaaacattcaaaaagtgctttggggataggaaatgtgaaggacggtaggcatggtgagagtttctaaataagaaaaagtatcctaagggaaaaaaaggaaaaggacaggtaaggcataaaacaacatgtgggtgcatggaaagcttgctaaa

SEQ ID NO: 483925 - DNA, 1000 bp, Homo Sapiens
gcattcagctcagtaaatctacatttactgctcaccaaatctatatgttacagtgaaagcagcaggcagaggaacagttttgctttcagctcagtacatctatgttttgtctcggctggtgagggatggtttctggtgttgtctttgtcccttacctatgaagataagctgttaatttatattgtcaggtgagggaaaccacctggagagatttgtggccttttgtcttgtaccttatctgtttaggaacaaaaggaagttttttgcatattccatgactcaattcccaagcttaacttttccttttcgcttagtgaatttggtcccaagattttattttcctttcacagtataccccatgcccatcaatcccattccccctgcatcctataggtaacctcttcttaagcaaatacaaatagataaatccttattttctgtttttttttttaaaactttattttactgttactttctgctgtcctaattatggcacatttttactttctaggttctgtgatttacagagtggtctggctatgtggacagcttctaaattgtcaccacattttggagcaagatgtattatttttacaattaatttacatttaacatgaatcatgatcctaagtgcatcagaatgtcttcataacattcgccaaagaagagagggcagcactgctgttctacagtgtggctctcacctggtccacagttaccagaaatagttctttcgttgctgtgatgtcctgggtgggcttcattctttagtaatgtactttgtctacagcaacttcctgcaactatgtgaacagatcttgaagacacacagtgaggtttggtttcctttgtcctcttaagtctttatggttgktgcttctattgtttattggtcccagtgagaactgcagctgacctgatgtcatgatctgtgaagatagtttctattaaagaagaagtaccaggaaatcccatatgccaccgtagacctgcctttctg

SEQ ID NO: 483926 - DNA, 1000 bp, Homo Sapiens
tctaaagatcctagtgaaggaggaggcggggtttaactctggactagattgaagacagctggaacagggaaaaggcaccaaaagcacatctccataagacgtgcacaccagcaccatgacagtttgccactgccatgacaacacccaaaatttatcagcccttttctagaaatttctgaataacccaccccttaatttgcatgtaattgaaaatgggactaaatatgactacagaactggccctgagctgctactttgtgctcaatgcctatggggtagccctgctctgcaaagagcagtacctctgctactgtgcagtactgtttcaagaaaagtcactaacaccactgggttgcccttgaattatttcctggacaaagccaggaaccctccctggctaagctccagttttgggcccacctggcctgcaccactagaagagtgactatatccttgtaataactaccccctccacactcatctttccctaaaacaagttatgttaagcctttgctttaatgaaaactttcccaaatgccctttgcgtcacacttcaatttggacacaccactcatttccttctaccacagcagacaccaccagatggctctaggctgtgagaaagagttctatctggatttttgggagctctcaagatttttgacccgagtggtggtttcatggttgttcatttgtgaatatttaagctgttcatatattttctgcactcttttctatgcatatctcccaatgttttcccttttcttctttttttctttttttttaaataaaaatagagatgaggtcttacattgttgcccaggctggtcttgaactcctgggctcaagtgatcctcccacctcagcctgtgaaagtgctggaattacaagcatgagccaccatacctggcacaattattattattaatttatttgtttatttattttgagaccgagtcttgctcttgtcacccaggctggagtacaatggcatgatccc

SEQ ID NO: 483927 - DNA, 1000 bp, Homo Sapiens; identical to SEQ ID NO: 310116

SEQ ID NO: 483928 - DNA, 1000 bp, Homo Sapiens
ctcgaggctctccaggcggtccttgagggtctgcagcgagcggctgagctgctccacgacgtggccggggtcccgcggcaggtcgcccatagtgtccttgcccgtggcccccgcgccgcgcgccttgccgcccgccagcccctcgcagcgcgctagcttgcccgtgagctcgcggatggccctcgcgctggccagcgtctccttctgctgcacgacggtctcgcgcagctgcagcaccgcggccctcagctcctcctcgggactctgcgcgccgccctgcatgggcatcgcgggcagcgggcagccggcgtgcaccgcctctgggggcagtgccgtgcacacgaagcggctaccgggcgccgggctgtcctgggccccagcggccacggcgagcgccacgctggcggccagcagcgccagcatcccgccgccgctgccgcgctcagctcggcatgggcgagcgggcgccgtcggggcgctccgcgggaggcgccttcgctgctggcagtagccgcgctgtcgtctcgagggtcgcgtgcaccgcggggcagaagtctcctgccgtctcacagccgcacccaccgcgctgctcggcactctggcctgccgggtccgcgcgccctttcttaagctgaggggcggagggggccggcgtgtggggcgcgcgccacgagctctgattggctcggccgggtgcgcgtcacgcagtgggcggagcggggcggggcgggggcgctttccgttgcgcgcctggcggccgggcgggagcgtgggccggagcctgaggcgagagcgcgaggtcccgggctctgcctcaggaaaggaggcctgaggtggaaaacgacactggggctctcgagagcctcggctggccgtgcccaggcgcccctcgaacccacccgaggacgcgggcgtcacaggctgaggagaaagtgggaacccctcggtgtcccggtgcccctttctcagggtggcttctggcgcggcacggggcctcgct

SEQ ID NO: 483929 - DNA, 1000 bp, Homo Sapiens
gaattcaaaaactagctgggcatggtggcgggaacctgtaatcccagctactcaggaggctgaagcaggagaactgcttgaacccaggaggcggaggttgcaagtgagccgagattgtgccactgcactccaacctgggcgacagagtgagattctgtctcaaaaaaaaaaaaaaaaaaaaagtaatttaaaaagctggagggtgtggggtgatgaaaccaaactggtaaaacactgacaactgtggcacatctatgactggagggtcattaaactcttccctccactcttctacatgttttaaattttctgcaataaagccactgtctaattctgcctgtcatctaaacctacactcctttgactatttattctgctcctcagtttagattcctccaactcaattatcccttagaccatctttattatttatttatttatttatttatttttgagacagagtttcgctcttgttgcccaggctagagtgcaatggcgcgatctcggctcacagcaacctccgcctccaaggttcaagcgattctcctgcctcagcctccggagtagctaggattacaggcatgcaccaccatgcctggctaattttgtatttttagtagagacagggtttctccatgttggtcaggctcgtctcgaactccggacctcaggtgatccgcccgcctcggcctcccaaagtgctgggattacaggcgtgagccactgcgcccggcctatttccttattcttcagcatgctcctgaagctatttgttaggactactacataaaagggcaataaaacatgtattccagtatttggttctatgttaacaaagtcttcattcattcaatgctctgtatgttcttgtcacaaagctcatttctaacaaatcgttctgaaattcaacttatcaactacatcaaatgaagagagagactgacttgccttaaggaatcaagaataattcctctaaggatttgattttaaaacgacaaac

SEQ ID NO: 483930 - DNA, 1000 bp, Homo Sapiens
ccacttccttgtaatcattttaatggtcagaatacatcttggaagtgtgtctagtttattggatttcacaatctctaggctagctcatttgatattcacaatcctcacgtgaactggattgtgcaggtgtagttcccaatttgacaaatgaagacactgaaatgaaaatatgtcatcccttcctccaaggtcttacagtcaggaattcaaagaaaaaggactagaaggaagatctttcaaattctagaatggtcatttttgatgttttgttgttgttgctattttcgttgttgaggataactataattttttgtgccaaaaatgtggcaaacctttctatggggaaaacgatagaaatggcacttaaccctaacccattggacataatctattatctgtttttactaaaatccactgaacctgtagaaatcttagattaatcagaaacacactcttttcttgtgcttctcaataaataattgaattgtttttgcccaggaattacccctgagcaactaaaatgtttaccttcctgcagttataaaaatctcggtgggggttgtttttcagctcctttaactcgtccatctcgttaagcatctgatggacctggaacttcgaggagaggaacttcaggcgccggtgggtataggtcttactgtgaaaaataaaatcacataattccaaaaagtttcaggcattcaagaaaaacagtcacaatttcaaaactatcaggacctttatcattcataggaaataattgttggaacaaaccttttagtttactctgcagttaatcccactgagaagtagtgggctccaaaggcttaatcttttcaataatgttggacataagaatgagggagaactttgaaaggtatcttaaaactcaatggagagagtgttattcaaagtttggggtcagcagattcgagtgtgaatcctggctcagccagctgtgtcactttaggcaagttacttaagtcatcaaagtctcagc

SEQ ID NO: 483931 - DNA, 1000 bp, Homo Sapiens
caaggagcacacagccagcactcggggctgaaggtgggataagacgcacaggtaggaggcactgagtggtgagacccagttccatctactgtttattggacacctacagtagccaagccctgggcggacctgcttatacttatgtaatcgccagcctcacaataaccaggggaggtaggtgttctgaccatggcggacacagtgcgtcccggctggagctactcggcgctgtggacgcgctggtgctgaatgagcttggtgctctggtggaagcggcggccacagtcctggcaggcgaagggcttctctcgtcggtgggtgcgcagatgctgcgtgagcgtgggccgctggcggaaggccttgccacactcagggcatgcgtagggccgttcacccgtgtggatgcgccggtgctgggtgaggttggcgtgctgccgaaagctctggccgcactcggggcaggcgaagggccgttcgcccgtgtggatgcgctggtgctcggtgagccgcgagacctgcgtgaagcccaggccgcactcaccgcagtggtagggcttttcgccggtgtgtgtcctctgatgacgcgtgagcttgaggcgctggctgaagcgctggccacactcggggcaggcaaagggtttctcgcccgtgtgtacgcggagatgctgcgtgagcgtaggccgctggcggaaggccttgccacactcggcgcaggcgaagggccgctccccggtgtggatgcgccggtgctgcgtcaggttggagcgctgccggaagctctggccgcactcggcacaggcgaagggccgctcgccactgtgcacgcgccggtgctgcagcagcactgagcggcggccgaagcgctcgccgcactcgacgcagccaaaggacttgtcgcccgtgtgtaccgcctggtgctccagcagcacggcgcgccgcgcgaagctctcgcggcactcgctgcacggaaaggggccgggaggctcgggcgcaccaggag

SEQ ID NO: 483932 - DNA, 1000 bp, Homo Sapiens; identical to SEQ ID NO: 310120

SEQ ID NO: 483933 - DNA, 1000 bp, Homo Sapiens
tttcaaatgggacgaggagggtacaactcaaagactgggcctctctggcataagggtcttctgaaagctggccggcattgactgcctcaccctgcctgagcatgcagaatttgcctttctgctggagagatccctgtttcacaaggacgaggcaggggaagggcaggctcctcagaactccctggccatacgtgtacaactctttcatttagagagactgggttaactctagtgccacccacagatgaggtctgctctcagcaaaactaagacaaaaggtggagggatgagaaattcctctctgtggacctttctgctaccccctcttccctccaccacaataaaaactgacctgtggagttctttgcccttcagactctgcgaagcactcacagctaatatgattaacaccttgtttggactgattctgtgtcataatggctcagggtacacagtccccagagaaggttgcattgagcaggcctgttgttccttcattctgtcactcattcattcaatcaagatcaaatgcctgctctatggctagatgagaggtatttcagtgtcttaataataataccaatagtactataaaaatgaagaagtgggagaagagcagagatgacagcagagaggaagagaaaagggggaagagggagaggatcaagaagataacagagcatctgacttcatgccagcacccctgggacggactctaggggactctcgggagtggtagccattgcagtgggattgccacctgtggagcctttcctaccactggacgctgatacagatttcccaaggccactgagcaaccctcaaaaagctgcctccttcacccgggagtgaggttcagccttgtgtttctggaaagtgcacatgctgaggccctgagttttcctggatttctgtccgactcttggcatggcccacctttatctgggggaacctatctaaagaggctttgtctgaggaaaagctccacatgtaacctggg

SEQ ID NO: 483934 - DNA, 1000 bp, Homo Sapiens; identical to SEQ ID NO: 310121

SEQ ID NO: 483935 - DNA, 1000 bp, Homo Sapiens
ggatccacaatatccctatcttggcaacatttccaggagtcctaatatgctttggcctgttccttattgctgggacatgcacaaactagaatcattattgtcagcatctgaggacgttttaactaatccagttattctccagacaaattagaagctgcatgttctcatttggaaactaggattttgtaagatacatgcaggccaaagagatgtccaggcagggtttataagagccgggccttccctgcttgcttccttgagaaaatctccaccatttgcttctccatctgagccctgagctcactctcttacctcggtgacgatggacgagccaggcgtctcgtacacccagccgtcccggcaggggcccagtggcaggcggctcctgttggtgtccaggctggccagggggtccacgcagtcgaaggtgctctggttccagtccacctcgtagcgcctacactgtcttggggaggcttcgcccgcaggtcctgggcccggcaccgtgtagttcagttcctctgcaggactccagccgcagcgcagactcagctcggccactccggggctccggcagcggtggtcaggggtgaagcccaggaagacgatgcccacgtagatgggcgcgaaggtagccgagagcagagccaagaggaaaaacatttgcttctggaaaaagtgaaactcccctccatgctccaggacatcgtccacggtggtgggcatgatcctgcaggcaggagggcccgaggctgcccgacgtgcccggagcgaggctgagagcggctgcagccagctcagcacaaaccctggccagaagtcaaagaggggagtttacctctgcaagtgaccagccttcagggcagggcctttccttggtccagctgacttcaaaggtgcacccctccagcgggggtgcatgtccttctgcacttcccaaatgccctgagctcactcccaggatgcctgtcgtgtttattataactggttctccacaggc

SEQ ID NO: 483936 - DNA, 1000 bp, Homo Sapiens
gaattcctgacctcaggtgatccacccacctcagcctcccaaagtgctgggattacaggcatgagccaccgcgcctggctccaatttaacatctgtaatccaaaaaaatctgaaatgcaaaatgctctaatgggcatttccttggattgtaatgttggtggtcaaaaagtttccagtgttggagtagatcatgcattttcggattagggatgctcaacctgtactattattgggactgaacttcagccaagggaagtcacagagtaagtatgagctggagcctgggtttgaacccggattggcctaactccacagtccatgcttgtctcctgagggtcaattgtgaggtaccctgaaaagcagggtaggggcagaatgaaaaagatagggtcgaagcccagggtgggttgggggctcacctgaatctcctccaggaagaggttggtttctacaaagcggttgctcatgaagccaccaggtgcccggcagttctgcaggaagcgggctgggttgggacgcaccttggggtttgctcccaccagctcacagtaatggggcaccagcgttttggggatctgtaggggaggggtcagtgtcagggcaggggtagccagctgcagaggggtgagcagggcaaagagccaggggcaagaaactttaccttcccagggttgcgtagggctgctgcccgaggtaggggcccattgaagacttcccaaatgaggcagcccaagcgccacatgtctgctgacctgtggcagtgacccagagctcttagggccccaccaaccacctgcacaggcctccagcctgccttgggcaccaggcacccactgcatgccagggcctggctatgtccctcagctgagccatcagtcccaagaggcaggtttcattagcctcacttaacagattaaaaaaaccaagcctcagagaactaggcacatctgtccaggtcacagagctttcaagttcagaatcacccaaccccgaatgctgt

SEQ ID NO: 483937 - DNA, 1000 bp, Homo Sapiens; identical to SEQ ID NO: 310122

SEQ ID NO: 483938 - DNA, 844 bp, Homo Sapiens; identical to SEQ ID NO: 310123

SEQ ID NO: 483939 - DNA, 321 bp, Homo Sapiens
ttcgatctctagcttggtcccctggccaaaagtgtacgggacacttttagactgttgacagtaatatgttgcaatgtcttcaggttgtagtctgctgatggtgaaagtgaaatctgtcccagatccacttccactgaaccttgccgggacccctgtttccaaattggtgacatcgaagatcagcagcttaggggctttccctggtttcacctgataccaatttaaaaagtgtctaatgtcttgacgcgcctggcaagagatggtaactctgtctcctacagatgcagacagggaggatggagactgggtcatcacgatgtc

SEQ ID NO: 483940 - DNA, 1000 bp, Homo Sapiens; identical to SEQ ID NO: 310125

SEQ ID NO: 483941 - DNA, 1000 bp, Homo Sapiens; identical to SEQ ID NO: 310126

SEQ ID NO: 483942 - DNA, 1000 bp, Homo Sapiens; identical to SEQ ID NO: 120190

SEQ ID NO: 483943 - DNA, 1000 bp, Homo Sapiens
gcttaatactacaggtgagccattgcgcccgtctaattgagcattcttaagtcactctagcgaggccacacgtccagcagaagtgagctggattcacacacaggcctgatcacacccaaagtaccaggtcacaacctcttacactagaattatgcaaatggcagtggatggggttgcaatgatgaaaaaccaatgttaggatctgtctgacccaaagcaggcagttgacaagtagttgttgaatgcacccatgaagttagcaatagcaggagagtgaccaagaagtcacccctgcaccgacagagcactctgcatcagccacatccccatctacctacgtgggccagagctccttagaagtgacccaaacctgtttccattgcacttagcacgagccaggccctggcctcccttgcactctcccaattactcggaatcacccaggaagaggcctgaaaataagatacgcttatatggcacgcacagacctgggcccagctgagagcataggccagaggcaggtcctgacctctatgtgctagcttccgggggattctgagcacagccagattgcagagccactgccttggacagtggtgtggactcagtaaccccggttcctgcagacaggctcttacttccagcacgaggtactgctccggggctggggcttcccccatctctcccagcacgcgctcacactccagggagatggcatctattgaggtcaggaggggggccacgatctctgggaactggagaaaaaaagaaggaacggctggtgaggcctgggggcatgcagatgcaggacagctgccccagcagtggggtggagggaggaggtgttcacacagcccgtgcccatcctctggggaaaccacctctcttctgagcctgtttttttgccttcccagctgcaaagtcagtgtgtctaacgagcccgaccactgtcattttcctggccaggctacgggcacggacggtaccttcttttctgcca

SEQ ID NO: 483944 - DNA, 1000 bp, Homo Sapiens; identical to SEQ ID NO: 310129

SEQ ID NO: 483945 - DNA, 1000 bp, Homo Sapiens; identical to SEQ ID NO: 120191

SEQ ID NO: 483946 - DNA, 1000 bp, Homo Sapiens; identical to SEQ ID NO: 310131

SEQ ID NO: 483947 - DNA, 1000 bp, Homo Sapiens
tgggcgtgatggtccctgaagaccagcgtgggacggaaacgaatggatttgtcaccacagccacccaacaccacacctttgtttctggcaattaaaatgagcttattccgtatggaatcatcgggagtatcgaaggagcaaaaggtgcctcgtcctctcaccctgctgatgaactgggggtaccgggcctggaggtccagcagtcctgtgagcagggccttcccggcatgggctgcattatttagcaggtcctcccgcttgatgatgttgatgacctcagccagcaacaggttcttggacgggtcccccagccaggtgttgaagatccggtagggagcattaggcctgaactcctccttgtggaagaagcccccagtcatcatcttcttgctgaaggtcatcacgtctgctgggtcatccaggccccaatgctcgtgggcccagaacttgcccgtgcagcctcctccggtctggacctcgtccaccaagaaggcgcagccatgcttcctggcgatgtctctcagcttccgaaagaagtcatcggatgcgtggttgtctccaccctcggactggatgggctccacgatgatcccggccactgtcttcttctttttccgatatttcacgatcagatcctccacctcttccagacagcgggcctcctcctgttggttctctttcacaaactcttccagagggtatttcagccgtgggaacggtgcgatgggccagtcaaaggaagggatgtcgatcttgtgaatggctttagagtgcgtggtcgctaagcaacccatggtcctcccatggaacgcgcccatgaaggagaggatgctgtagtcggggcagccaggggcctggttaatcatgcacgtctccagctcctcctgggagaagcccctctgccctctttccttgctccggtaccacatgaagatggtctttaaggcgttttcattggagcaggagccgcaggccatggtgatgagctgggacatccctt

SEQ ID NO: 483948 - DNA, 1000 bp, Homo Sapiens
gcagtggaatttgtgttttgtgcaacacaaaccttttcctgagcaccaaggcagcacttatttgcaaagccccataagcctgactcctttttagagatcccctagcagagtttatggtggtcacacagagctgctttttagatgcatttgcgggaactgggaaatgagccttcaacttgtacttgacttgtacttgttctcctgctgtgtgagctcaaggagcctgactcatgccacttcctgcacttcctcctgacctccacaggagggaggcaggcgtccatgcctggcaaagcctcctgctgagctgccaaagctctagctgtttgctcagctgtcacatccaggtcctgtctttactgaactgtctacacagccttacctggggtgtgaggctctccaaggcttcctgttagcttttttgtttggggtggcagggtgagggggatctattgccaccctcgaagaacatctttcccttgctttttagggagcttttcggcgctcccatttattccttatacaggctcagttttgtctagtgtatagggacagcatttctgagagaaagcttattcatttctcaagagtaaagatctgttaagaatatgggatcagagtcccactgagaatgatagtaaaggggatgggggcgttggaaggccttgaatttgaagcaaaggaaattaccctttctctgttttctgactcaaggttagtctctccctctgttcaactgccaggccagcccaggcctttgcagagttatcacagaaaaagagcatgtagagaatcagtgagttgcaaatttctgcagaaaatagaccaaagagctagctgctctgatgagtattgctgatagcttaaaaaaatagcttctgaaggtttataatgtacagtgaaaaatgattcccttttcagtcctgtgtatcccttttaccagggctttgggtttcaggagaaagtaggaaatcttgtccagttgtctcccaggggcgcc

SEQ ID NO: 483949 - DNA, 1000 bp, Homo Sapiens
  misc_feature (14)..(14): n is a, c, g, or t
  misc_feature (49)..(49): n is a, c, g, or t
  misc_feature (51)..(51): n is a, c, g, or t
  misc_feature (139)..(139): n is a, c, g, or t
  misc_feature (151)..(151): n is a, c, g, or t
cccctattccccantacccaaccagagagacagccccacgcccggcaananggcaactccgggmcacggagggmgccgcccggacagcccggccgggtcagggggcttcgccgcagagcaccctcmggcagccgccctngggcctccgmgnccgggcgggagggcgcctccccgaccacacttcggccgmttggcacccacagccgggagggcgtgaggaaggamtcggtstaactccggggaaccctcggagttccggcgcagacacccgagggggtgtcctgggaactccttcgcccgcgacaacccgttcttctccgtctcccgaccaccagcgacgcagcagggcggctgccggcccggcccggcccgccttgcgggctgtgcgcggcgcagctcttcctccgcggggccgtgaaggccaccggccgcccccgcgcgcccagctgccsggccccgccgcctaagccgccgcgttgctggcgggtagccgcgggcctccggtgcgcgggccccggcgcgtccccgagcgcgcgcctggccgcggccccgcgcgagttgcactaactttccggggcgggggaggggtgggcgccgcgggcccggctcccaggccttacctgtgctcaagttgtcgttgattttcaaaggcacccgcaggatgtagaccaggaatagcacgatgaagaaccacacggtccacagatacgtccaagaccaaactatgcaggacttgagctgctccagaaagcccgtggccgcttcagccatgtttcagcgctcctctctgctgccgcggctcttggtgtctgccgggatgattcaccggcccggaggcgcagctcgcgccgccgccgccgccgcggcccgggcgcccccggagcccgcccgccgccggggacgcgggctcggcgggaaatcgcgcgggccgcgggcgcgccggcttttccttctccagccttattgctaactctctaaaggtccctacaagtggctttcg

SEQ ID NO: 483950 - DNA, 348 bp, Homo Sapiens
cagggatcttgtgccaggggtctctgaatagaacagtagaaaccagtcaataaggtaaaggtataactcaatggcaatgagcacacccagcctcagcatttggtttctaaatatcattctccactaaaaggaaacattccttggagaaatggctgggatgggggaaatataatataagcccagagcatcttgtgcaaacaagacaagactcaaagaattaagggtacagcccaaagaacacaggagccaacttggaggggctggctaaaataataatgattgtaaaggattataaccattgactagaataaaataagtatccataagagtaaataggaaaggaagacc

SEQ ID NO: 483951 - DNA, 1000 bp, Homo Sapiens; identical to SEQ ID NO: 310135

SEQ ID NO: 483952 - DNA, 978 bp, Homo Sapiens; identical to SEQ ID NO: 310136

SEQ ID NO: 483953 - DNA, 1000 bp, Homo Sapiens; identical to SEQ ID NO: 310137

SEQ ID NO: 483954 - DNA, 1000 bp, Homo Sapiens
gaattcggctcatctccttagctgcccagaaattcatctcagatattgccaatgatgccctacagcactgcaaaatgaatggcacggcctccggcgagctcccggagcaagagcaaggtgtgaggggaggcttaatgaatcagtaattaccttccacaacagtggaggcttatcctgccacccctttggggaaactgaatcgtaggggaggtgtaagacttactcagggtcacccatctgggattgaagtccgggattcctgtgctcagttggtgctcttccctcttccctcaggaccgcaagtacactctaaccatggaggacttgacccctgccctcagcgagtatggcatcaatgtgaagaagccgcactacttcacctgagccacccaacctaaatgtacttatctgtccccatgtccccacaccagcctgttttcataataaactttattgtgacaggcggggctgatccctcccatgttggaagacaccatgtggcaagtgacaaagctctgagcccgcccctcttgcgcacagtggtagggatgggggaaggggatggaccccaggctggggtagtaccatgactggaggcgggggaggcaaccagaggcctgctgctttggggaggtgcattcccccaaccatgtcccgacacctctggagttcaggcaaggaccttccagtcctacttgtcctgcatcttctcaaggataggcacaatcatgtcaaatttgggtcgctttgcagggtcttcattcatgcagatcttcatgagcttacacacatgaggggaaatacctggtgggatggtaggccgaaggccttccaatgccacctgcgaatacaagaaaaaaagcagcctcacaatttgagtctgtcatgtagagagaagccactggcccttgggacaggattactgtatatccgaacaaatatgtgaggagccaaggcccactacagttattttcaccatcaccaaccactcccgcaacac

SEQ ID NO: 483955 - DNA, 1000 bp, Homo Sapiens
gctgccccaagtcacagtctggtctctgtctcccatcctcagcctcctgggggtccctccccaaccctctggcaaatttgtctccgaaaacaaagggttagaaccatggggctcaggggtaatgtttcatgaaatctttaatgaaattggggagaggggcacaaacagaagggaggggcactggggacaggcttgggggcaagggaggtggacacggggcagggcagggcagggggctctcctcttccctgcagcaaccctcccccagtcatcccactgacgggggagggaggtggggaggtggagccataaatacgtccagagtttcaaagaggtgaggggcgaagagctggccagggctctcagagagggggcaggggcaggcccgggccacccttgtctgggggccctggctccttgggcggccgtgggggccctggggggtcccctggcttgcgaccgtgcttgcggaagtagcggtagcgctggacgtaggcccgcaccaggttgctcaccttcactgggttgatttccccacttttgctgtggcagatctggggggccggggacagttggagtcaccaccaggctcccggggccccatccacccaggactgttgggcgcagcttggaactgcggtaggaggagcttccccaataaccaggccaaagtccctctgtccccctagacgatgggtgccccagggccagcggaacaggcccaggtggccttgagaaaatcctgtcaccctcctcacctcccagactgacctcctccccgtctcccatccgcgtccatctgtctgcacacatctgtccctccagctcgttctctccccggcctgtgtctgcccctctctccgggtgcccaccttgtggacggccttcctcaggatgtccttgtactcctccttggtgatgtccttcttctgatagtatggcttgatggccagcttcacctcctccaccgcccgctcctgcgtgtgcagcttcttcagat

SEQ ID NO: 483956 - DNA, 1000 bp, Homo Sapiens
taatatttttgtgtagtagaaagagcactggaccaggagtcagaagacctgggttctcctgcttttgccactgtccagctgtggaagcatgaataaatcacttactgcatgctgtcactgttcttatctgaaaagtttccagctcttaccggtctgagttgtacctagaagaatttaaagatccaatcttccatggaccccagtgacaagtaagaatagaggttttcattattcacaattctctgatgagaaaaatcaagacccgagacaaagctttgcagacatctcacctgaggtcatccccatcgctgagggcttcatcctttataaccttgaggttttcagatttaacagtcaccttggccactttcttttttgctggaccatctgctgaacccccaggatgactgcagcctcttttcctctttccttgtgaaactttggagagaaggctcttctttgggggtttctcatcttcaaaggcatctaggtgacaacacagaacataaggtgaggggtggaaggaaaggtggaggcagtgcagcttatgggcaggggcataaaacggctctacgacctgtctccaaaccccatctccatcactggttcaccatcccctggtctggtcagcaaccagctctcagcttcttcccacctgcggctagtctatattcacagtaaaaaccatcttcctttatcagcactttacttctcctatgactacagaaaataccataggactcaaataaaacctaacttccagatcttaaatgtcagctaacctcctgccaggaaaatacagcatccattaattagcaccttatttattatctgccaaaattaattgtcttagggataatgtactcctaagtaaaatgttaagtacataaacatgtccaagttttaccacaacatcattactattaatctacatttctgccaaccttcaagaccaaactgctcaaaacacatactgctctgaaacctttccaatgtaacc

SEQ ID NO: 483957 - DNA, 1000 bp, Homo Sapiens
tcaattccaacctgtagaacctttgaattcacaacaggagtctgaggcctactttttggcctagatttcttttgtgttttggaagatccatttcttacaaatgtcttattaataagacaatttaaatgtttctctcctccttgaatcctgctcaagccgggaaagtgagacatttctgatcaggatcctgggcaggactgggaggctcatcatcacttctctgcccccagctctcccgctcagctacaggcctgtgtcaccactccccacagggaccccccagctccagttaccttgtagggtacttctccaagcctcaccactcttgctttcttcagccacgtgtccctggaatgcagagtgtgcacacaatccctgtggaaccaacacaggacacaaaggtaactcagtccacaagccccactgcgggaagtcgggacagtggagagcgcagccctgcaggctccctcctcaggttcagccaccctggagcaggccgagctcctagggggcccagagaagctgtgctaggcaaacagccttgaacgtggactggcctgtcttttgggggatgtgtccacttacaaaccctaatctgcagccttttgtgccttttgcctccaccactcctccccttcataggtttttcttctcctctgctgtccagagcctgtgagagctccagctgcagactatcaggatggggtaaaggccgctgtgcgcaggcacccaacctcacgtttactaccaccaccaagcgaacacctgctgaggctctgatctgctgttaacaccatgttgggggagggaagtgtccaggagggggcagtgaacccaaaggaaggctgcagagaagccaactataataagctaataagctatcacagaatcaagacacctgcacatggaacagtcaaatgattcctgctaggcaaagttcctctggtcttcactcttcctcccgagctaagagctcaccaaagccgtgcaaatctacttt

SEQ ID NO: 483958 - DNA, 302 bp, Homo Sapiens; identical to SEQ ID NO: 310139
  misc_feature (14)..(14): n is a, c, g, or t
  misc_feature (61)..(65): n is a, c, g, or t
  misc_feature (73)..(73): n is a, c, g, or t
  misc_feature (139)..(139): n is a, c, g, or t
  misc_feature (151)..(151): n is a, c, g, or t

SEQ ID NO: 483959 - DNA, 1000 bp, Homo Sapiens
gccattaagggccttatgtgcgggaagggggcagcgggataggaaagagatctgagccgagacggcgccgacaggcctgggcgaaaggggtgccacccacctgcgcgacctcttcgccatccttcaagtaccgcataggagcaggctgggcggggacgcgggtcagcctcctccacctccggcgaatgctccttctccccgatcctctagccgcttccctcgctccctctggaggcggccgagtgcggaacgcacgtcctcgacagggcaggacggagggacagcgggggcggaccgcgacccgaccccgaccccggcccgcagcgccgctcttagccccggcccggcccgccaggatacccccaacatgtcaggaggcgcgatcccgccctccgccggcttctcccgccgcttgtcagcctccctgccctggccccagcccggctccgcacaggcgcccgacccctgccctctcccccgcagctagcagttctgcagggctcgcagtctcctgcagggttttgtccgcaccgccgaatctcgcgcccagcctccctcaagagccgccgtttgaatctgcgcacgcggccctgaacctcattggctgtgggggccgcacgcgaagaagcgagggcggggaggggagagcgcgcgcgctgagggcggggctggggagctggaagctgggactggaactcgcgggagtcggggaaggagccgggagccagggggtggggccgcgggtggggccgtagtggcgcatcgagccgagccgtcataggacccggaacgcgccccgagacgcaccgcgcggggcctgctgggagagcgagttcctgcgctcgccgaggagtgggtccggaagcggcgccggagcgggtccggaagcgggcggtggagaagtccagttgccccaaaattcttagggtgagcgaaccgagtttctggcggggtggtggtcccgcggcccaccaagggaacgtctccgcagcctgcctcg

SEQ ID NO: 483960 - DNA, 1000 bp, Homo Sapiens; identical to SEQ ID NO: 310140

SEQ ID NO: 483961 - DNA, 1000 bp, Homo Sapiens
ctttattttttcaaaatatatttgccatgggatgctaatttgcaataggtgtcataatgagaataacccaaactggataaatgtgacaaatgattgacaaagcatttcacacccttcaattacaccacatcaagaatgaggggaaagcgttgtaaaagtagactactgcaatgctacttgtattcttgcaataaaaccagcaagcatccatatcaagagagttatcatctcacttccaactttttcccctcaagaacaatttgaatctctttggcatcaaagtctcataggtcaataaagcttctgcgagattcttatgctcctttgcatgagttttcaagatatgttttgctcgttcatatgagtcctgaaacagaaaaggagatacgtaagcagcagcaaatgcagggatgcgaaaaccagtcaatgggaagagaaagaaaaactttatgtaccctaaaaaatatgaaatctgtttatatttataaaatcatgtagaatcttgattctacagtagagataatttgtgcattataacatagtaaggaaaagagaataaacacctgagaaggcagagaccacctcttctataacactctctaaacctttccatcatacaaactttctgtatccttaactactctaaagcattccctctacttccttgaaataatcaaacccatggtccctcctgtggagaatgcattccctaagccctctcaagtgctatttgttcatgtttaccctagttacttcacagtaaacagctgagctcattgttcccattacctctttcagaccattactaacctaccctcttatataatgcactcttcctattctgttgaagtccaggccatttgactatggagctatccaaccgtcttcattgtgccatctgacaaacatagtccttactcactaaagactttggcactcagctctgtcactctctctctctctatttttttttcagtctcactgttgcttaggctggagt

SEQ ID NO: 483962 - DNA, 1000 bp, Homo Sapiens
ttttttttttttttaatggacattgacaagcacatttgaaaatttatatggaaatgtaaagcacttaaatagtcaaaacatttgtttaaaagaacaaaactggagggtttacaataccatgtcaagacttaccataaactacagtaattaaaaaagtatggtactgatgcaagaatggataattagtccaagtggaaagaacagagtccagaaacagacccaaatatatgaccattcatttattaacaaagtccccacgcaattcaatgggaaaagaaaggtgttgtttttttcaataaatgtgtagagtagatggatgtccatatacaaaataaatcttgatccccccctcacaccatacacaaaaatcaactggtgataatcacagatccaacagctaaaactataaagtttctggaggaaaacaaaggcaaatgtcttcaaaatcttgagagtgggctgggcgcggtggctcacacctgtaatcccagcactttgggaggccaaggcgggtggatcacgaggtcaggagatcaagaccatcctggccaacgcggtgaaaccccgtctgtactaaaaatacaaaaaattatccaggcatagtggtgggtgaacacagcccaataaaattttataaacagaaacatgcagtgggttggaattggcccacaggccatagtttgccaacccttgatacaaagcaaaaataaaaaacaaacaaaaattcttatacatgcaacatggatgaatacaatgtgaacaaaagaataaactgtatgactccgtttatatgaagtttaaaaacatttgaaaataatacatggtcatagaaatcgggacagtagttgactgggggaagcgagtggctccattgataggaaggggcagaaggaatgaaaatgttttatatgtttatctgggtagtaatcacaaaggtatacacatatgtaaatttcaccaagctacacacttttttttgttgtacataaattatagaact

SEQ ID NO: 483963 - DNA, 1000 bp, Homo Sapiens
ctaggtgcatgccctgccgtggggggctcagggaagaggtggggttttttggggtcctcagagccctgtcctctagctccctggtaggagggagaccccgcagcggacaagcccctccccgcggtcaccttgccaaaatctccacttcctctggccttttcctccggatgggagagggatggcttcaggcagagtgcaccctttcctctccgccaggcctggcagtgggtggggtgggggcctcctacctcctccctacagatgaatacaagccgactttcttcctcccatcctagccctcccccacctccatccaggtgggacaggaatcagggaccccctggatgcctgtgagggtgtccagcagaaattggaggaaagggaagttgggggaggggatgggagggagtttcctgtccttcttcctgctcccccacccccagcacacacatgaatatgtccccgacttccttccctccttcctgccccactgctgttcccagtcctggagaggtcagggacccaggaggtccctgagcccagccagactgtctagccctccaccaccgtcctccagagggtagggggttcccacctttctctacagggactgagatgcttagaatctgatcacttctcagcacaacttaacactgatgccactgctgctaataacagtcacatctgcctacttggcacctactactctgagacatgggttaatatctcagtacaacccctgggagacatgatttgagcatctttacagatgaggaaaactgaggctcagcaaaatgaaaccgcttgcccaaggtcacacggtttctaagtgatggagctagaatttacccaaccctaggctgcctggttccggagctcctggacgtaacctctgtgctatcctgcctccctccacagcggggaaactaggatgagcctttagggaccatctcctccagactgtctcccaccccgcttctgtttactcatggggaaactg

SEQ ID NO: 483964 - DNA, 1000 bp, Homo Sapiens; identical to SEQ ID NO: 310143

SEQ ID NO: 483965 - DNA, 145 bp, Homo Sapiens
cctaccattggccgtcgggtccggaagaggtcagtccggtccactccccactctcacaacccgacgacaccggtgactgtttccggggtctcccagccccgtgttccgacttgggactgaggaagggaagggactggaaagggtc

SEQ ID NO: 483966 - DNA, 1000 bp, Homo Sapiens; identical to SEQ ID NO: 310146

SEQ ID NO: 483967 - DNA, 1000 bp, Homo Sapiens; identical to SEQ ID NO: 310147

SEQ ID NO: 483968 - DNA, 1000 bp, Homo Sapiens
  misc_feature (694)..(694): n is a, c, g, or t
ccctgtggttatcatatcccgaagcatatggtgagaagttcagttcagaatttgttaataaccatgaaaccatttttattttaggacccacattggatcacctgacgtcgggagttggacaccagcctggccaacatggtgaaaccccgtctctactaaaaatacaaaaattagttgggtgtggtggcacgtgcctgtaatccccggtactcgggaggcagaggcaggagattcgcttgaacccaggaggtggaggttgcagtgagccaatatcacgccactgtactcaagcctgggcgacagagcaagactccgtatcaaaaaaatatatatatatatgcttttaaggcaacaaaatagtcaaaatctccacaaacagaaatctgataaattttggtattaggtgtatttctaaataataccaacagcaacattatctgaatacacacttctcattgccactgcgaggtccgacagctctaacagttttttgggtacgctgtagaagcaggatgtcttcctcttgttccatttcgtcactatcccattggcgacaacccagagctgaacagatatacctcacctcacctgaaaagacaaaattagatacaaaattagtaaaaggagacaactcataatagatcagagatattaaaggaatctgtaatttttaaaaaagtgaaaggaaactaangaaatgtgtatgaagtactcaagtcataagaagcatcagttagattaccaactcctaaaatgagttatttagaacaatgacagtaccaatgaatatttatttcagggaatgattttaaggatttacataattttagccttactttggagatttccatagaatatacaagaagaaatggatagctacttgtgatagcttttctacaatatcattaataaaatttcaggtgagttaaaaaaaaaatcaaccttagagtttctgtataacaaaagtgtttggtttttaaaaatttgaaacttttctgag

SEQ ID NO: 483969 - DNA, 828 bp, Homo Sapiens
  misc_feature (41)..(41): n is a, c, g, or t
cagctcagtatagtacctctgggtctagctggctctgaaancagttccaacacagtctacacaaggcaaacgagttaagtttgggagggtggcattcaaagtctctttccaaattcctggttgctgtcaggtgcttgttcagggggtgagtgcattttatgtgttgtatttttcttaatccagccccaattcaggttgtagaaactacatcttagctgtgtcactattccactactggaacactactgccagttttcataattttcagacttattgggttttagattaacgggtattttaatgaaaacatgagaagagattcatcaggtacatctgctgctgtgctagtaagtaaaggtctgaaaaactcacctgctctgggctcatatacagtttggtccctacttgtcctgtgtgtctggcataagctggcattggggtcagaaccgtctgctcttcctcatcctggtccattgcagtcactaacccaaagtctccaaccttgaccacatcatccattgtaaagaatatgttggatggctggaaagaatacaacagacaaaagtacagtgggtgtgcatggaggcgaaaaagtaaagagaattatttaaatgactacaaagaaaaaatacaacaaactagatattttcaagcatatttctttttaaaatgggctaacaggaaaatagtgacaatttttctgtgccagacaagtactgctagtaaagaaaagggaagggtagcaaagagtgctagtatttattgaacatctacttaaaccctttgaggtgcacattccctagggatcatggtacttaatcctcaatc

SEQ ID NO: 483970 - DNA, 1000 bp, Homo Sapiens
gatcgaggtgggggtagccaggggcgctgtctccagtgacaaggtctctgggacccctcatgggctcaagaccccctcccccaggcagcagctgtgtgattcatcaccaccccctctgcacctcgggcccccccactacagccgccccactccccgtcagcggcagccggctgctgcgtcagccactcacgcagggtggttattaaaggagagagacatcagcaccgagctcccctgcgcccgccgtccatgcgggaggggccacccacccactggagccccagacgcgggcgccacatgcccagcctgggagcaattcaggcccattctttctgatctgcgcccccagcccccagccccagcagtcagcgcggtggacgttctctgacccagagcagcccttgtagggggggagttggagggggtgcctggtagtcacagcggcccctgcataattgcgtaattcttgccgctccccccagcccatcgttccctggttctgtgagcctctgccttttcctggttttgcgaagcgccgtgttcattcattcattcattcattcagccagtgcctagttattaagcgcttactacgagcgggttcctgggtgcgggctccgtgagtgtccgcagccatcctgggttcccagggtggcgttgacacgcacctgcgcacacctgccgctttgcatctgtgccgagcactgtgcaccggcttccaggtgtggacctgtgtcggtacctgtgcctctggggtcagctgcgtctgcgagcacccgtgactcccaggtatctcaccgcgatcctgtgtccccaccgggggtctcaggcggctgggaccccttcatccacccctgctggccactgaccatgcgggacccgaccgggacgcgctgcccgttgcggacaccagggggcgctgcggcctcgctccgtccgcggcgtttggctcgagcggccgggctcccggtgccgccgctccacgcagacgcctcgcgtg

SEQ ID NO: 483971 - DNA, 1000 bp, Homo Sapiens; identical to SEQ ID NO: 310152

SEQ ID NO: 483972 - DNA, 1000 bp, Homo Sapiens; identical to SEQ ID NO: 310154

SEQ ID NO: 483973 - DNA, 1000 bp, Homo Sapiens
aagacttacagctttatttctgctaggaaaaagggaggaaaaacagtcatattttaaacaaaatatttaaacaattattttactttatctaaaaaagtctccagaagaatgagaccaccctatgttggagagcaggctctttacaagctattgcattcctaaattttaattcaattataaaatccctctgtacaatttcagggaggcttggctcatgggtaccatactccccaaaggcataaacagcagattattaaagaataactctggctcattttagactgaagaaaagactctaaaaacattaacttgcatagccattcgaattattgctgctttttataaaaattatcacagaggtaattctctattttttcctttcccctcactccaaaactcagcagttcttagcaaaattatgagctactttccaaataaaattttaggaagggtttgcaagcacatctatggggctaaaggaattttcgtgaaaggaagagagaaataaattaaataaataatatctaataaataactcaaacaacagtgattatcacaaacttaaatgccagaaaatgctagcttcgaggatagaccctcctacagccgctcacaaaggtaagtgcagtatatactcagaaagcacatagtatggctttatatatcattttacttgcctatttcctctagggcagattgtgatgaagggaaccactttggtgactgatggggcttaagatctctctgcaaggctactttcaagtgaatttacaaaccaagggtgcaaaatacagcagggtaagtgctgagagcaaaatggaaaaaaaataacttatactgtatggagataataaataagagaggtaaacagacaagatacacatatagttggcagattttaggggatagctgagctatagaaaatgacatactaatatgtgttatcattttttaaattggccctattgatgtaccctgcatgttaaacttatcctttctg

SEQ ID NO: 483974 - DNA, 1000 bp, Homo Sapiens
tttttttttttttttttttttttttttgagatggagtttcgctctttttgcccaggctggagtgcagtggcatgatcttggctcaccgcagcctctgcctcctgggttcaagcggttctcctgcctcggcctcctgagtagctgggattacaggcatgcaccaccaccccggctaattttgtgtttttggtggagacagggtttctccatgttggtcgggctggtcttgaactcccgacctcaggtgatccacccgcctcagcctcccagggtgctgggattgcaggcgtgagccaccgcacccagcttttttttttttttttaaagcttccacatatgagtgggaatgtgcatgtttatgttcctggcttatttcacttaaataatgtcctccatttccatccatgttgcctcaggtgataggatttcattctggtctttgaatagtattcctttgtgtgtataaaccacattttctttatccatttatctgttgttggacatctaggttgattccatattttggctattgtgaatagtgctccagtctgggacagaacgagactttgtctcaaaaaaaaaaaaaaaaaaaaagaaagaaaaacttctgtgaagtgtaaatttttttcaccatccactcatggttcaattgacctatttctgtcatcgcagttattagatagtcgttggtaataagtttctgtaactggcatttcacctgtttttctggtatcatattagttcctcatgcagaacactccccgctgtcacaagagaaacaaatgataatcacttcccaggaaagataacaagctcgataatttaacatacgcctagtgtctccaggtggagattatcaccaccattaccaataccaagctgagatttctctttcattgttctttacctgagactgacttcaagttcctaaaatgagttgaaaatataagttagaataccaagtaagggatattacatgaataaatgttttgctgaatga

SEQ ID NO: 483975 - DNA, 1000 bp, Homo Sapiens
ctgccctagctcgctccggatccctttgggccagcagctccgggcgccggaaggaatggagcactttcttaagaggaagagcagtgggtcagcgccctgagcgctaaagagaaaagccgccgaagcccgacagcgcggaccaatgaggcggccttcctgcgtcgtggcggaccggcattgtccaatcagaagccgctactcccagctgaggggcaggggagaagctacgggtcctaccttggaacaaaacacctcgacaacaacgctctcctaattgctttgttttggttttaatctgcacaacaaaaaagtgaattgtatgacccagcgtcaagcaataagaaaaatgtattcacaggccgggcgcggtggctcacgcctgtaatgccagcactttaggaggccgaggcgggcggatcacttaaggtcatgagttcaagaccagcctggccaacacgttgaaaacccgtctctactaaaaatacagaaattagccgggcctggtgggacgcctgtaatccaagctactcgggaggctgaggcaggagaatcgcttaaacccaggaggcagaagttgaagtgggccgagatcgcgccactgcaccccagcctgggcgacagagcgagactgtctcaaaaaaaaagaaagaaagaaaagaaaaatgtattcacttcccttcgaagtttccgaagccattcaaagtgtgttttttattggttcttcatcgcatcacgtctattagacggaaaagtgactcagagacgttcggtaatttccccgagagcacaaatccctcaagtacagggcatagattaaaatatatatatatatattttttgacggagtttcgctcttcttgcccaggctggagtgcagtgacgcgatctcggctcactgcaacctccgcctcccgggttcaagagattctcctgcctcagcctccagagtagctgggattacaggcgtccgcagcagacccggctaattttttctattttt

SEQ ID NO: 483976 - DNA, 1000 bp, Homo Sapiens
cataatgctaatgcaagagggcttgaagtatcaaagagtccacaggaaatggatgcccccagtaatatcttttttttaaaaaaaatatacattatataatatatattatatatataaaaagctagtgtaaatgcttccatggtgtggtcacaaatttgaaagatgaacctcctttcagctgttaaccatcttcccatttgcaacaggttttaaaaagtcgtttttatcttcagacataacatgagttttcagaatgaggttgccagcactgacagatgtggtgatggggaggcaacttgcattgctaatagacactgggagtggctggctaaagcaagaagttaccggcagaattgttttttgctcctccagaatcacatggtcttcacctaaactctgtttcttctgctttggtggctccttttggtgctgctgtactggatgcccattttccactgccattccatttagcaactgatcattttgagaactgataccaagctgtatgtccaagatctcttcaattggttcactttgtccatcaggttcatcagtatcaagtgctgaaagctctaactcgatatccctatcaggtttagtatctgttgcatcttctgtataatcactctgtaactctccatttcttagttcaatttccttgcttaaaaggtttaaggtaaggtgacggccttcatccagggaattccacttctgttgcatggccaaagcattggcctctctctgaagaagtaatgagttgctcttggcctgctgaagttcaaggctcaaaaggtccccagtactggaatgctttctatgaccagataaatcagtaacaatgaatctgtccctttcaacatagtgtgctgatgatgtggcctcgttgccatatgaactccaccttgaatcaacagcattgacataagggacataatctgatacactgatgggcttagtcgcacttccttgggaagcagtggcctggacaggatctgtggta

SEQ ID NO: 483977 - DNA, 1000 bp, Homo Sapiens
tatatagacaatgacaggttattcagcaagcacaaggaagtactgatacatgctacgttgtagatgaccctcacacacattatgctacgtgaaagaagccagtcacaaaaaaccacagactgtataattccatttatatgaaatgtctagaatggccaaatctatagagacagaaagcacattgcctggaggagcagacagtgagtgctgtttgggggaaaaaatgttctaaaattatattgtagtaacagtggttgcacaagcctggaatattctaaaaaacactgaaatgtatactttaaatgggtgaactgtatggtatcttaattatatctcaggaaagctgttttaaaaaaacacatatttcaagttaacctatttcatacctttctttggcctccttgagtgcaacttcaagtctctccaccttctgattcccttcccttaggcacagcaggagctggctcacagttaactcctcatgttcgaagtaattcttggccccatctgcagatctcctcctatagtgagacaatgccctgttcagtataaaggttaaaaggttttcatcagaaaaattccaaagactaagaagagagtaacccaatataactgggaccagcttaaaggaactgctttccagaacattctccaactaattctcaactagtgaacaagcacagctggtcctgggacccccagtgccaagctcctccatgcttcctagggaaggtgtggagactcagtgaggctctggagaggccagcttacaatgcacacacccacgtcctccaaacagtcactgtgtacctcacaccacaccacaaaactcacggaacagttcagcagaggcagccgtggctgaaggtgccaagctttccagagatctagtctcaaaggggactgcagtcagacaaaagataaaggcacattgtacagaccactggcctttctccaagttaacagagaccatcacagcttaagtcaaggggagaaaacc

SEQ ID NO: 483978 - DNA, 1000 bp, Homo Sapiens; identical to SEQ ID NO: 310156

SEQ ID NO: 483979 - DNA, 1000 bp, Homo Sapiens
gaattcccttttttcccaaaaattttattgggggaaaactacaaaacatttacagtacaatgtttacagtctacaatttgtagtgagctgatttcccaaaatatattacaactcaagttgacttatcttgttacattcaaaaacctacttctgtccaaagtagtccagagagtacatatagtgctccaactgtacctacgacaaactaaagctaccgctgattcatctgctgccaggaaagcttaggagacattcctgcctttctacatggaaaaaaaaatagtacaagttttggaattttctgtaattaaacaaggcatattcatgtactacatatttcagcactaaggcgggttgcttcactttatatctatataaaaaaagtggtaaaaatcttttccttttgtgcagttgaacccatcctacattcagattctctcaatcactaataaaatacgtatttggttgaggaagatttaaggcagtcgggcccttcaaaggcatggagactccccccccactccccgttatggctacatgtctttatactcgagtatgtcacagtagaactggtggaataagcaaacacttttttgctagtttataaagttggaattagaaaagcatgccacatttcagcctgattgcaaagtatgtggtcatttttttcattgaagttggatgggctacaacctttatacattctaagaaaactcataggatgttcctcaaactacttccacagcatcaagatcgatttctgtcaagaaatcatgcaatctttcaaaatttacgtaaacaaggaaagaaattaatgaaataaatattacatacaatctcttaaattaagaattttgtactcatttacaataaaataaccaagtgaagttacaaaaggcatatattactgtgaaaagaacatacactccacattttgccgattaataatggcaatcataatttaacataataaaagaatatatatctattgcttttcatc

SEQ ID NO: 483980 - DNA, 431 bp, Homo Sapiens
cacgtgcctgtaatcccagcatctcgggagctgaggacggagaatcgctcgaattcaggaggcagaggctaaagtgagctgagatcgtgtgccactgtactccagcctggccaacaagagtgagactctgtctcaaaaagaaaaaaatatataaagaaagaaagaactaaaattcatcaaaggtcacttaaagcaaagcactctatttattcacattttatagatactaattatgttttcactcatgcttttcagtatttcaaaataaaatggctcctcattttcatgccaaaacatctttacaaaaattgttacagattatttccaataccttgttctcagcaatttggcatcaacactactcaggcaacaacattcatatggtaatagttaaatttgtttttcactagggccctctcagccaaattttt

SEQ ID NO: 483981 - DNA, 1000 bp, Homo Sapiens
ggatcacatcctttatagggacacggatggacttggaagccgttttcctcagcaaactaatggcaggaacaggaaaccaaacactgcatattctcacaagtggcgggtgaatggtaagaacacatgggtggggacaggggaataacacacatggggacctgtcagtgcaaggggttccggcatcagggagggagagcatcaggaggaattaatgcatgcaggccttaatacccaggtgatggaacgatgtgtgctgcaaaccgccatggcacatgtttacctatgtaacaaacgtgcacatcctgtacatgtaccccagaacttaaaagttgaaggaaaaaagcaaggttatatgcagagaaataaatattttaaaaaaaggaacaccagttaatagggtgcacaatacttgaaattacaaggcagtacaatcacattatattcctctgataagaaaaaaataatagttttaagacatactatgcctttgaatatcttaaaaaaactgtcattgttttccaaatgctactacagtccctctgatgttttttgatgctttcccattttcctaaatcccattttctttgagagaaaatagagagaaaaatagtgtctttcatgtatataatggcattaaaagttgataaaacttaagtacttgcatatgtattatttcatctgatttgccaacattttccacagcactgtaagcttttggagggcagaaatactttcctattcttcgagaggcttacagagagcagacctctggcaatgcaccctgtgaagtaggcagagtagaattaattccattgagtgaatcctgtgttacagggaaaacagacaccatttttcttactggcttatgagaatcatagcatctgcgagctgaacatcattatcttgaggatgaatgaaaacaggtaggagaatgttcttgttcttaggagataattaagaagttaggagtgaattacatggtttttggaacttccttaca

SEQ ID NO: 483982 - DNA, 330 bp, Homo Sapiens
acctaggacggtcagcttggtccccccgccgaacacccaagggttttcgctatcataagactgacagtagtagtcagcctcgtcctcagtcttcagtccagagatggtgagggaggcagagttggaggaggtgtcgatggagccagagaaccgatcagggaccccaaagggtctttggttatcctcataaatcacagtggtgggggaactgcccgggcgctgctggtaccactgcacatagttgctggcaatgctgccaccggcgcgggtgcaggagatggttaccgtcttccccagagactccgacacagagtggggctgagtgagctc

SEQ ID NO: 483983 - DNA, 1000 bp, Homo Sapiens; identical to SEQ ID NO: 310159

SEQ ID NO: 483984 - DNA, 1000 bp, Homo Sapiens; identical to SEQ ID NO: 120193

SEQ ID NO: 483985 - DNA, 1000 bp, Homo Sapiens; identical to SEQ ID NO: 310163

SEQ ID NO: 483986 - DNA, 1000 bp, Homo Sapiens
tttgaggcatttgatgctctctgatactattgtaattagtattttccttttttttttttttttttttgagacagggtctcgttccctcacccaggctggagtgcagtggtgtggtaatagctcactgcagcctcgaactcctgggctcaagtgatcctcccacttcaattccccaatagttgggactataggcacacaccactctcataatttcaatttctaattgttgctaagataattttgactttgtatcctgcaaccttgttaaattcacattatttctacgtttatatcaattttctacaatcatgtcatctgtgaatgacaattttatttcttatctgtaagcctttcatttcttttgcttgcactggctagaatctgtacaaagttgagaaaaagtggtgatagtgggcacctttgcctttttcctgatctctggaggaatacgcttttcaaaaattcacaattaaatatgttggctctaggttttttttgtagaacttcttctattaagaagttcccttctattcctagtttgtgcagttaaaaaaaaagcaagtgctgaattgtattgctttttatgcatctataaagaacttgtctcctttatttccataaatgcagtaaatagtattaatcttcctattttaagttacaggcagtccttgattttttacggctaactgaactcttgctggtttctatggtataaatattcccatcagagcagactttaaattactagtatgaggtcactgaactcgcagctgggaaagatgtactatcggttttggtgggccagggtgagctagtttgaatacatttttgattgtgtagttctcaatcaccgagacagaaatttatcataacttcactagaccagtaagaacaaagccactttataaacttacctattttataagtctctcacataatccatgaggtagatcaaaataaaaatataactccctttttttttccccaagtctttactaag

SEQ ID NO: 483987 - DNA, 1000 bp, Homo Sapiens
gtatggaaatggatgcctgctcttttttcatttttatttttctcattgtggccaagattcatgtatcattaatgttttcaagaataaacattttgactttattaatttttctctattttttgtttgtcctcattagaagctcccattttcccatgtcattggtttgatgtgtaatatttacatgatcattcaatttaaaacattgtctgacttctgttttgttttatcagttaactcattgtgaattgagaggtctgctactttattttgataatgcagggatattatttatctttgcagaatcaggtgactcccaacgttcccggaatcttctagtggtctgtgtcaggggtctgggctggctggggttcagtgatgtctactggaggcagcttccatgccttctggggtcctgagtctccatggcttgtggggtctgggtcccccctggattagtggatggccagagtggcatagacactgggctcagctggagaggccccttcctgggatggaggaggctcagttgccttctgtctgagggtaaagctgtgcagctgggcgtaggtcacatcctggggggcttcagatgcagcagcctgcagcgggggagagtgagagggaaggaacgtggtgggggtgggggaggcctgggggcctggagaggaaaggactcacctcagtgtccatctgtctgtcctcttctgcctgtctgtcctttgtgtccaggaattccccagacagtggggagggaggagaggccatttctctcctaggtctggagtgtttcacctcggcatacgtcactgcctgggggtcttcatcgtgtgggctctgctggagagagacagtggtggggggtgtccttgaatcctcctgactccctggagtcaattttccccactgttcccagggtgatccgattacatccctttcctgacggaatctcagggatgccctaaggccgtggagggtctggccgctccctccctgtggttct

SEQ ID NO: 483988 - DNA, 1000 bp, Homo Sapiens
atctaggtaagaattatatttaaatgtttctgaacaaatttggcatagaacctaatccataatgcacatcttcaatcgcatgattatacttcattatttaaattccccaactgagtaagaaactcttacttaactaaagcatactttaacaaatcagcccctaggggagatagaaattataaattgaccattttccataaagttaaaatggtgacaaatcatagaagaatgtgaaagattagtagaaaataccaaaatttgttataaagggtaaattcaagccaggctcccgcacacacaaatatcatatttaatgtttttcaagtctctgttgtctaagtaggtgaatttgggacagttacatgcaattatttgtcatccaaacaactgaaatggataaggagaacaaaaattgctttcatttattagtgactggttccaactgcccagaaaatactcagttttttttatggtatctgaactgagaaagatgtacaacacataacatcaagagaacacacaggaatactctcatgcctcttctaacttttaggccactgggaaataacatttacgtcttaatttttgtcatgaagagcaatttcaagatttcccatcagggaagaggaaattgctacaataatatctgaatgttaatataatcatctgtatcatacctatttggtatatattactttgtcatcaaaaaggcaatggccatttttcattcatgtaagtgccagtgaaatattttcttaaatattttcttaaatatattttcaactgcagagtttgactctaaattgtctgaaatatttacagtaaggatttctagttgaaataccgtatatagagaaggaacacctataatattgcaatcgcattagattttctgaaaacaaggtactctataatgagttctagacaaaaatcaatctaaatgatataaaattagtgtttatgttcacaaaaatatttatttatttaaattaactctaat

SEQ ID NO: 483989 - DNA, 1000 bp, Homo Sapiens; identical to SEQ ID NO: 310164

SEQ ID NO: 483990 - DNA, 1000 bp, Homo Sapiens; identical to SEQ ID NO: 310165

SEQ ID NO: 483991 - DNA, 1000 bp, Homo Sapiens
gagattacacaaagctctaaaatacctgaagaaatattctttctcttctccccgggaagattttgcatatgctggtatgttgttttttaattaaatggccatcccagggtagttttaattataggctttctagttaatccttacggacaattcaggttttctctttgtcagttttaaaactagttgtggagagatgtaattaaggattacattatccaacatttataggaccatttagatcttctatttattcttttaccaatttttataaattgtatttatctaggaatacatagtttggatatacattttgatatttattggttataagttattcttaagtactttcataatttttcaagatctgcagtagtcacacggtatctgcttttctcattactcatgttgttttgatatgcattttcttttttatactactagtgtcacagtagattgacagtttcattggcttttcaaatagtcaacttcagaggttaggttctccagaagcaaatacaaagggagagtttgagatgcaaaggacttgttaggaattgagtgttgattcagctgccctgaacttaactttgtttaagttacttgacttaaccaaagtttcatagctaataactagataagccattaaaccaattggtctccataactggcatattcaatacagcatagaaaataacattccttaaactctacctgtgtaggaaaatgcaaaggtctattcctaatcttatgctttcttttcttgcagtcccgtggccatctctgccagagttctccactgttgtgtacacttctttcttgttctgatcacagtggttgaacatagcaaatgctgagacatatcaaattatgaggacaaaatattactctttaaaacaatctttattgtgactcagtagcgttttgagtgtcggttcagctaacctgactaggttgcattctttagggcttcatcctagcagtccccaaggctgctctagtg

SEQ ID NO: 483992 - DNA, 523 bp, Homo Sapiens
caaaaaagttaagctgtcgttttttaaaaaacaaaataaaaacatgtacagcatttgaattgagtaaatttattctatttgcctaaaccaatgacttaccaatgtggagttggtgatatcctcaattggaagattcttataaggaaactctatgacattaaatgaagcagacgacttcagagaataggaatgattctgattttctttctgtttggaaataacaattagatgatttcccagatatcaggccttttatatttatttgaaaacactgggtatgtttgctaaatgctgcacctgtctacttacattcataaaagtctcagtccacagtaatgactttacgtacaagattgcactctttcctctgtctaatctcccaacttggcagacaatcttcaagcactgagcaactccacaaccctgccaaaacaaatcctttacttataagaaaaggtcattctatcatctcttcaacatttgaaaatttgccattttttttctttttgtgtgatggccaaag

SEQ ID NO: 483993 - DNA, 1000 bp, Homo Sapiens
gtataggttggcttgaaggatttgacctaaaatttatacaagttaaaaatgtaataaaatattgtggatttaatataaacagaagtgtaataggatctaccagattttcatactaaaacaaaatattgtacctttgttattaaaagcaagaatttggatggtatcatgtatgtgtttataaaattctaccatatgagtgattaaaaaaatccaagttcatgcagttataaagtctttagtattctgaaaagtaaactgtagtgtaatatgtattaacattaagtacctatacaaaagacatgattgctaaggtccaaatttggactgctttaaaacaacaacaacaacaacaacaacaacaacaaataaagttccgtacattaaatcagaaacagtaactgaaggaggtactattttatataaagtagtaaatcaggcactacctgtcttatatacattgaataaaaactatcccttgaaattttattatttaaatacctaaaaacacaagtcaccctatgttattaaatgtatgtctgaacttatttataaggagaaggttgacaaatataattctcattttgtggttaatgccaattagcactatcagcagtaaagccttggatttttactcctcatgaagaaagtttaaatctataataaagttgctaattctagtgggtcaagatgtagcataacttaaaaactgcagttaagtttctgagtttccttcaccattttcacgaggttgaagctgctccctttcttgttcttcttgaggtggccggacccgtttaaaaaagcccatctgtcagttgaagaaaaaccattattactgtcacatcagtgtagaatacgaaaagtattttttgggtgactatattaccactaagaacatttaaattgtatttcataaaatttatcttccctcatataataagtaatgctcatcaagtatcatcattacagtccctttcttccttcccttacttttcattct

SEQ ID NO: 483994 - DNA, 1000 bp, Homo Sapiens
ctgggattacaggcactgccaccacatccagctaatttttgtatttttaggagagacagggtttcaccatgttggccaagatggtctcgatctcctgaactcgtgatctgcccgcctcggcctcccaaagtgctggaattacaggcgtgagccaccgtgccctgccctaaatttcttataggaaagccaagatcattcatttcctactttttttctttcctaattcattcattcgtggcttgtagttttccagtttcatcgcttgatgtgtaatatttacattgtgattcagtttaatgcactttctgacttagttttctcagctacttcattgattattgagaagtctgttgctttatttcaaaattgtagagacattagttatttatactgcagaattgagtgacccctaaaagttcccagagtctcctggggtagatccaggctgggtggggtccaatggtgtccactgggggggcagctcccatgcattccagactccatggagtgtggggtctgcgtccccccctgggctagtggatggccagagtggcgtagatgctgggcacagctggagagggcccttcctgggatggaggaggctcagttgcctcccgtctgagggtcaagctgtgcagctgggcgtaggtcacatcctggggggcttcagatgcagcagcctgcagcgggggagagtgagagggaaggaacgtggtgggggtgggggaggcctgggggcctggagaggaaaggactcacctcagtgtccatctgcctgtcctcttccgcctgtctgtcctttgtgtccaggaattccccagacagtggggaaggaggagaggccatttctctcctaggtctggagtgtttcacctcggcatacgtcactgcctgggggtcttcatcgtgtgggctctgctggagagagacagtggtggggggtgtccttgaatcctcctgaccccctggagtcaattttcctcactgttccccgggtgat

SEQ ID NO: 483995 - DNA, 1000 bp, Homo Sapiens
gtcattcataaaatttattttggaaaaatattttaaaaaggaatttcttcattaacaaaacagtaaaaaactcaaataacatttgcacaatattccataaatacatttatatacaaaaaaatatagtcacatagacccgaagtgcctttgtacatatttaccaaaatttaaattataaaaaacgaacatcacaaaatactcaagctttacagatatcatgaaaaatatttttacaaatccaaaaaataacacacatcttttccatctagaaaaagcacatcttcgtatcaaaaaggacaataaaggcagtgtttgtgtttctaattcaagaaaagactggctcataagaatccaaaatatacactcaggcagtgcatgcttcttatgcgtaattcagttcacccatttaaatatatattctcttaagagcaactgtccatagtgcaacggcgacgtcacggaaggcagtgccgcaggcggccgggccgcgacaggctgtcggcaggcgtcgaggacctcaggaggagaacctgctcggtctgaactcggtttctcagcagcagtccacgaggcctccctcctcttcagcagcattcgttggggcatatatccttggaattttacttagtttaagagaaacgggagtcttgccatctcacttccattttacacctggggggccacaagacaaatgggaagttagcctgagaccgattcccgtgctccagcttcaggtgctcccatgccgaggaggagggagcggctgctgcctgcactgacctcagttgctatgacgcactcatccttctcctcggatatgacgtacaccgactggtacttggtgtcttttgaagttgaacagcccgagtccggcctttttctttcagatgcttctccactaaaaggaaaatagagaaaatccacaatgaatgcatgagaacatttgggaagagaaacggagcagtggttccaggaagacaccccccaggtaccccctcct

SEQ ID NO: 483996 - DNA, 1000 bp, Homo Sapiens
gaattcgggtttatagctatcatgaatggctaagattgtgttcacctcctctaattttccttcctagaaaatagaaagaaaatgaagatctatgaaaagaaactcataataattaaatgaattagcaaataatgttcagagattaattatggttacaataagaacaacagtaacaaaacatataaaaaaaaacataaattagtgtgtaactttttaaatacatatgacgttttcttatttttaagaaatagaatatttaaaaaaattttctccaggagttcaacatatgacaggagtcttcaggtgttaattagtactagctacaatttagataaaattattagttaccttgaggagatctggatcgattcctttaatctttggaactggaactgggggcagaatcagcattttaatccttgaaaacatataaaattttggttttgacatcttaaaagctacatattctcaattatagcaaaagatagaaataaaatattggcaatactattactttttccaaatattctggtactttatataattggagtgtgagaaacagaagaaaatattagacagcaaatgagaaagaaaaactgtagaaggaaaaaaaagaacaactaaaaaacccaaaaagcctcatctgaagtctattaaaagaaaatgtggttttcccacaattgtttttttcttaatgctttttattttcagccagatttagtatttgaaagaaagaaatttaatttcatctaaagctgatttccatttcagctataaggcaattctagtgtacatctcatcagtaatttgtacaggaaagaaagaaaaaagagtcaatccacatggagccaagattacttacacccttgaaaaagggtagacttgggtaggttagccatatagttcatattaattatgaaattatctaagatgatcttattaaccagggttttactacagggttcatttcagatgggacagattaaattttaactatctc
